(19) United States
(12) Patent Application Publication
(10) Pub. No.: US 2024/0254179 A1
(43) Pub. Date: Aug. 1, 2024

(54) Targeting Nuclear Speckles and DNA Speckle Association

(71) Applicant: THE TRUSTEES OF THE UNIVERSITY OF PENNSYLVANIA, Philadelphia, PA (US)

(72) Inventors: Katherine Alexander, Philadelphia, PA (US); Shelley Berger, Philadelphia, PA (US); Celeste Simon, Philadelphia, PA (US)

(21) Appl. No.: 18/418,058

(22) Filed: Jan. 19, 2024

Related U.S. Application Data
(60) Provisional application No. 63/439,914, filed on Jan. 19, 2023.

(51) Int. Cl. C07K 14/47; A61K 38/00; C07K 14/16; C12N 15/113; C12Q 1/6886

(52) U.S. Cl. CPC C07K 14/4703; C07K 14/163; C12N 15/113; C12Q 1/6886; A61K 38/00; C07K 2319/10

(57) ABSTRACT

The present invention provides polypeptides, compositions, and methods useful for the inhibition of transcription factor/DNA-speckle association and for manipulation of nuclear speckle content. Also included are methods of treating speckle related cancers in subjects in need thereof.

### CROSS-REFERENCE TO RELATED APPLICATIONS

[0001] The present application is entitled to priority under 35 U.S.C. § 119(e) to U.S. Provisional Patent Application No. 63/439,914, filed Jan. 19, 2023 which is incorporated by reference in its entirety herein.

### STATEMENT REGARDING FEDERALLY SPONSORED RESEARCH AND DEVELOPMENT

[0002] This invention was made with government support under CA078831 and CA220483 awarded by the National Institutes of Health. The government has certain rights in the invention.

### SEQUENCE LISTING

[0003] The instant application contains a Sequence Listing which has been submitted in XML format via Patent Center and is hereby incorporated by reference in its entirety. Said XML copy, created on Jan. 18, 2024, is named “046483-7359US1-Sequence-listing.xml” and is 1,615,092 bytes in size.

### BACKGROUND OF THE INVENTION

[0004] Transcription factors are key regulators of gene expression that are critical for regulating processes including development and generation of induced pluripotent stem cells. Likewise, dysregulation of transcription factor function can lead to diseases such as cancer. Many transcription factors are capable of driving different cell phenotypes and developmental outcomes depending on the cellular environment. For example, p53 activation can result in the induction of either cell death or cell survival pathways. While many tools are under development to activate or repress transcription factors, methods to toggle functional outcomes of transcription factors from one pathway to another are lacking. Shifting the type of response elicited by transcription factors is particularly impactful in cancer contexts, where transcription factor pathways are co-opted to promote cancer cell growth, invasion, and metastasis.

[0005] Nuclear speckles are nuclear structures which contain a myriad of factors involved in RNA production, and have been identified as a distinct regulatory niche in various gene expression pathways. As such, there is a need in the art for therapeutic options and prognostic indicators for transcription factor-related diseases and disorders that target or involve nuclear speckles or transcription-factor-driven DNA-speckle association. The current invention addresses this need.

### SUMMARY OF THE INVENTION

[0006] As described herein, the present invention provides polypeptides, compositions, and methods useful for the inhibition of transcription factor/DNA-speckle association and for manipulation of nuclear speckle content. Also included are methods of treating speckle related cancers in subjects in need thereof.

[0007] In one aspect, the disclosure provides a polypeptide inhibitor of transcription factor/DNA-speckle association comprising a first polypeptide domain, a second polypeptide domain, and a third polypeptide domain, wherein:
[0008] a. the first polypeptide domain comprises a cell penetrating peptide;
[0009] b. the second polypeptide domain comprises a linker region; and
[0010] c. the third polypeptide domain comprises a DNA-speckle targeting motif.

[0011] In some embodiments, the cell penetrating peptide is selected from the group consisting of an HIV TAT peptide, a penetratin peptide, an R8 peptide, a transportan peptide, a cyclic R8 peptide, a cyclic TAT peptide, an HA-TAT peptide, and an xentry peptide.

[0012] In some embodiments, the cell penetrating peptide is an HIV TAT peptide.

[0013] In some embodiments, the HIV TAT peptide comprise an amino acid sequence of GRKKRRQRRRPQ (SEQ ID NO: 2603).

[0014] In some embodiments, the linker region comprises an amino acid sequence of GGSGGGSG (SEQ ID NO: 2604).

[0015] In some embodiments, the DNA-speckle targeting motif comprises a polypeptide sequence which is at least 62 amino acids.

[0016] In some embodiments, the polypeptide sequence comprises the pattern X1(30)-X2-P-X1(30), wherein
[0017] a. X1 is any amino acid; and
[0018] b. X2 is T, S, E, or D.

[0019] In some embodiments, the polypeptide sequence does not comprise four or more consecutive proline residues.

[0020] In some embodiments, the polypeptide sequence contains proline residues in a minimum of three of positions 16, 21, 36, 41, or 46.

[0021] In some embodiments, the polypeptide sequence comprises at least five negative or phosphorylatable amino acids.

[0022] In some embodiments, the negative or phosphorylatable amino acids are selected from the group consisting of D, E, T, and S.

[0023] In some embodiments, the polypeptide sequence comprises at least five small or hydrophobic amino acids.

[0024] In some embodiments, the small or hydrophobic amino acids are selected from the group consisting of A, M, V, F, L, and I.

[0025] In some embodiments, the polypeptide sequence comprises fewer than fifteen positively charged amino acids.

[0026] In some embodiments, the positively charged amino acids are selected from the group consisting of R, H, and K.

[0027] In some embodiments, the DNA-speckle targeting motif comprises an amino acid sequence set forth in any one of SEQ ID Nos: 1-2602.

[0028] In some embodiments, the transcription factor is p53.

[0029] In some embodiments, the transcription factor is HIF2A.

[0030] In another aspect, the current disclosure provides a pharmaceutical composition comprising at least one polypeptide inhibitors of transcription factor/DNA-speckle association of any one of the above embodiments or aspects or any aspect or embodiment disclosed herein and a pharmaceutically acceptable diluent or excipient.

[0031] In another aspect, the current disclosure provides a method for inhibiting transcription factor/DNA-speckle association in a cell, comprising contacting the cell with an effective amount of an inhibitor of transcription factor/DNA-speckle association, wherein the inhibitor is the polypeptide of any one of the above aspects or embodiments or any aspect or embodiment disclosed herein.

[0032] In another aspect, the current disclosure provides a method for inhibiting transcription factor/DNA-speckle association in a cell, comprising contacting the cell with an effective amount of an inhibitor of transcription factor/DNA-speckle association, wherein the inhibitor is a small molecule.

[0033] In another aspect, the current disclosure provides a method for inhibiting transcription factor/DNA-speckle association in a cell, comprising contacting the cell with an effective amount of an inhibitor of transcription factor/DNA-speckle association, wherein the inhibitor is a combination of a small molecule and the polypeptide of any one of the above aspects or embodiments or any aspect or embodiment disclosed herein.

[0034] In another aspect, the current disclosure provides a method of treating a DNA-speckle related cancer in a subject in need thereof, comprising administering to the subject an effective amount of the pharmaceutical composition of embodiment 19, thereby treating the cancer.

[0035] In some embodiments, the cancer is clear cell renal cell carcinoma (ccRCC).

[0036] In some embodiments, the cancer is selected from the group consisting of breast cancer, cervical squamous cell carcinoma, endocervical adenocarcinoma, colon adenocarcinoma, rectum adenocarcinoma, glioblastoma, head and neck squamous cell carcinoma, kidney renal papillary cell carcinoma, glioma, liver hepatocellular carcinoma, lung squamous cell carcinoma, lung adenocarcinoma, ovarian cancer, pheochromocytoma, paraganglioma, prostate adenocarcinoma, sarcoma, skin cutaneous melanoma, stomach adenocarcinoma, tenosynovial giant cell tumor, and thymoma.

[0037] In another aspect, the current disclosure provides a method of treating a DNA-speckle related cancer in a subject in need thereof, comprising administering to the subject an effective amount of the polypeptide of any one of embodiments 1-18, thereby treating the cancer.

[0038] In some embodiments, the cancer is clear cell renal cell carcinoma (ccRCC).

[0039] In some embodiments, the cancer is selected from the group consisting of breast cancer, cervical squamous cell carcinoma, endocervical adenocarcinoma, colon adenocarcinoma, rectum adenocarcinoma, glioblastoma, head and neck squamous cell carcinoma, kidney renal papillary cell carcinoma, glioma, liver hepatocellular carcinoma, lung squamous cell carcinoma, lung adenocarcinoma, ovarian cancer, pheochromocytoma, paraganglioma, prostate adenocarcinoma, sarcoma, skin cutaneous melanoma, stomach adenocarcinoma, tenosynovial giant cell tumor, and thymoma.

[0040] In another aspect, the current disclosure provides a method of generating peptide inhibitors of DNA speckle association, the method comprising:
[0041] a. screening a library of protein sequences for those comprising a DNA-speckle targeting motif comprising:
   [0042] i. at least 62 contiguous amino acids;
   [0043] ii. comprising the pattern X1(30)-X2-P-X1(30), wherein
   [0044] iii. X1 is any amino acid; and
   [0045] iv. X2 is T, S, E, or D;
   [0046] v. does not comprise four or more consecutive proline residues;
   [0047] vi. contains proline residues in a minimum of three of positions 16, 21, 36, 41, or 46;
   [0048] vii. comprises at least five negative or phosphorylatable amino acids selected from the group consisting of D, E, T, and S;
   [0049] viii. comprises at least five small or hydrophobic amino acids selected from the group consisting of A, M, V, F, L, and I; and
   [0050] ix. comprises fewer than fifteen positively charged amino acids selected from the group consisting of R, H, and K;
[0051] b. identifying proteins comprising said motif sequence; and
[0052] c. generating peptides comprising said motif sequence.

[0053] In some embodiments, generating the peptide inhibitor further comprises adding a cell-permeability sequence to the DNA-speckle targeting motif sequence.

[0054] In some embodiments, the cell penetrating peptide is selected from the group consisting of an HIV TAT peptide, a penetratin peptide, an R8 peptide, a transportan peptide, a cyclic R8 peptide, a cyclic TAT peptide, an HA-TAT peptide, and an xentry peptide.

[0055] In some embodiments, the cell penetrating peptide is an HIV TAT peptide.

[0056] In some embodiments, the HIV TAT peptide comprise an amino acid sequence of GRKKRRQRRRPQ (SEQ ID NO: 2603).

[0057] In some embodiments, generating the peptide inhibitor further comprises adding a linker sequence between the cell-permeability sequence and the DNA-speckle targeting motif sequence.

[0058] In some embodiments, the linker region comprises an amino acid sequence of GGSGGGSG (SEQ ID NO: 2604).

[0059] In another aspect, the current disclosure provides a method of screening a tumor tissue to determine speckle signature score, comprising:
[0060] a. obtaining a specimen of tumor tissue;
[0061] b. isolating and purifying RNA from the specimen;
[0062] c. performing RNA-seq using the RNA to determine relative gene expression levels of Speckle signature genes;
[0063] d. determining the Z-score of each speckle signature gene;
[0064] e. for each speckle Signature I gene, divide its Z-score by the number of speckle protein genes in speckle Signature I, then take the sum of all these values for Signature I speckle protein genes;
[0065] f. for each speckle Signature II gene, divide its Z-score by the number of speckle protein genes in speckle Signature II, then take the sum of all these values for Signature II speckle protein genes; and
[0066] g. take the log(2) of the ratio of the result from step e to the result from step f thereby determining the speckle signature score of the specimen;
[0067] wherein, samples with high positive values are strongly Signature I and samples with low negative values are strongly Signature II.

[0068] In some embodiments, the speckle signature comprises the genes FIBP, PQBP1, SART1, THRAP4, FASTK, C19ORF24, CDC34, FBXL4, WRN, RNF169, TRIP12, SON, RBM27, BCLAF1, PRPF4B, SETD2, RBM26, and EPC2.

[0069] In some embodiments, the genes comprising speckle Signature I are selected from the group consisting of VAX2, JDP2, PLEKHN1, HDAC5, C11ORF49, SLC4A2, STYXL1, TMEM179B, TAB1, ZNF446, TBXA2R, UNC45A, PCBP1, PHLDB3, KTI12, AKAP17A, PRCC, ZNF821, SPINDOC, HSF4, DEXI, HEXIM2, EHMT2, VPS72, DDX39A, KIF22, DPCD, LHPP, CD2BP2, CDK11B, GTF2H4, DGKZ, SARNP, ALYREF, SLC2A4RG, TEPSIN, AKAP8L, PPIE, STK19, FIBP, C60RF226, H2AFX, EGFL8, PSMD13, CACTIN, EXOSC7, C120RF57, THAP4, TMEM259, THOC6, AP5Z1, PQBP1, RBM10, C1ORF35, C19ORF24, SART1, CDC34, FASTK, POMP, PRPF6, PRPF19, BRK1, UFC1, SNRPA1, ZCCHC17, SNRPB2, PCP2, SSH3, SETD1A, WDR90, THEM6, U2AF2, RBM14, MAST3, LIMK1, SF3B4, DDX39B, RTEL1, ZNF165, MAPK12, PSMD8, CDK5RAP1, PDZK1IP1, SETD4, CHTOP, CDK11A, SRSF4, TBX19, RTN2, CCDC32, CYSRT1, IQCK, MPP1, MAMSTR, ILRUN, DBNDD1, EPHB6, TCF15, C60RF52, CYGB, CCDC85C, PHYHD1, ITPKC, CDC25C, RMI2, SNRNP40, HISTIHIE, ZC3H18, SON, RBM27, TCF12, BCLAF1, ERBIN, SETD2, TCP1 IL2, EPC2, TRIP12, YLPM1, LMTK2, GPATCH8, DDX46, PRPF4B, TAB3, EPG5, RSBN1L, SF3B1, PUS7L, KCTD20, RBM26, BAZ2A, RBM41, RREB1, ZNF621, FAM160B1, CDK13, SDE2, DHX15, PRPF40A, CHIC1, SREK1, LIN52, BARD1, ZNF441, GNAQ, THRAP3, HBP1, SMC5, PPP4R3B, RBBP6, TTC26, COG6, ZC3H14, UBE3B, MRTFB, YTHDF3, UBE4A, CBLL1, API5, CMTR2, TBC1D12, WRN, KIAA1328, TMEM209, ZCCHC4, MAPK14, ZNF160, SLU7, ERCC8, FOXJ3, PCLO, RSRC1, ZC3H11A, BMP2K, RALGAPB, FBXL4, RTL6, RCAN3, FBXO34, ZBTB8A, CWF19L2, SRRM2, HELQ, FYTTD1, PPIG, ANKRD44, SOCS6, S100PBP, ZNF304, ZNF543, RBM25, EFCAB13, CPD, ARMCX5, POLI, ZNF551, MAML3, POLR3B, SFMBT2, DDX17, RNF169, KAT6A, DDX42, GPATCH2, CBFA2T2, E2F3, ZNF169, TAF5L, KIAA0100, PRKAA1, LHX4, RSRC2, CSRNP2, NCBP3, NCAPG2, SF3A1, DENND1B, BRD2, PNISR, E2F7, LRRC8B, PACSIN2, PNN, KIAA0556, SAP130, CPSF6, MAP3K7, TADA2A, HP1BP3, ZNF217, BRD1, SRRM1, SRSF11, GLYR1, FAM227B, AAGAB, PLRG1, FCHSD2, MECOM, TMEM56, CDYL, ELOA, STK17A, RIOK1, ARHGAP42, R3HCC1L, COPS4, BORCS7, THOC1, CIR1, PYROXD1, ARHGAP18, NSL1, WTAP, ZNHIT6, BCAS2, HAUS6, MORF4L1, SMC4, MBD4, PRPF18, CWC22, UBAP2L, SMURF2, KDM6B, PRKAA2, LIFR, RBM8A, SNURF, DAZAP2, FAM120C, WDR17, ZDHHC15, GTF2H2C, SRGAP1, ZSWIM5, RAF1, ZNF286B, ZNF528, ZNF572, ZNF527, XYLB, FNBP4, PRPF4, SIPA1L3, ZNF382, RFXAP, RBM39, CWC25, ZIM2, ANXA9, MFSD11, BPNT1, GPN3, MAPT, PPP1R16B, ZNF250, RAD52, ZNF786, GNB5, MNS1, TARBP1, RBM6, PRKN, ZCWPW2, MAMDC2, IPCEF1, NFATC4, LPAR1, VXN, FAM107A, IL16, USP22, RNF112, CRY2, PLAGI, IQUB, PPP1R8, BNIP3L or any combination thereof.

[0070] In some embodiments, the genes comprising speckle Signature II are selected from the group consisting of SON, RBM27, TCF12, BCLAF1, ERBIN, SETD2, TCP11L2, EPC2, TRIP12, YLPM1, LMTK2, GPATCH8, DDX46, PRPF4B, TAB3, EPG5, RSBN1L, SF3B1, PUS7L, KCTD20, RBM26, BAZ2A, RBM41, RREB1, ZNF621, FAM160B1, CDK13, SDE2, DHX15, PRPF40A, CHIC1, SREK1, LIN52, BARD1, ZNF441, GNAQ, THRAP3, HBP1, SMC5, PPP4R3B, RBBP6, TTC26, COG6, ZC3H14, UBE3B, MRTFB, YTHDF3, UBE4A, CBLL1, API5, CMTR2, TBC1D12, WRN, KIAA1328, TMEM209, ZCCHC4, MAPK14, ZNF160, SLU7, ERCC8, FOXJ3, PCLO, RSRC1, ZC3H11A, BMP2K, RALGAPB, FBXL4, RTL6, RCAN3, FBXO34, ZBTB8A, CWF19L2, SRRM2, HELQ, FYTTD1, PPIG, ANKRD44, SOCS6, S100PBP, ZNF304, ZNF543, RBM25, EFCAB13, CPD, ARMCX5, POLI, ZNF551, MAML3, POLR3B, SFMBT2, DDX17, RNF169, KAT6A, DDX42, GPATCH2, CBFA2T2, E2F3, ZNF169, TAF5L, KIAA0100, PRKAA1, LHX4, RSRC2, CSRNP2, NCBP3, NCAPG2, SF3A1, DENND1B, BRD2, PNISR, E2F7, LRRC8B, PACSIN2, PNN, KIAA0556, SAP130, CPSF6, MAP3K7, TADA2A, HP1BP3, ZNF217, BRD1, SRRM1, SRSF11, GLYR1, FAM227B, AAGAB, PLRG1, FCHSD2, MECOM, TMEM56, CDYL, ELOA, STK17A, RIOK1, ARHGAP42, R3HCC1L, COPS4, BORCS7, THOC1, CIR1, PYROXD1, ARHGAP18, NSL1, WTAP, ZNHIT6, BCAS2, HAUS6, MORF4L1, SMC4, MBD4, PRPF18, CWC22, UBAP2L, SMURF2, KDM6B, PRKAA2, LIFR, RBM8A, SNURF, DAZAP2, FAM120C, WDR17, ZDHHC15, GTF2H2C, SRGAP1, ZSWIM5, RAF1, ZNF286B, ZNF528, ZNF572, ZNF527, XYLB, FNBP4, PRPF4, SIPA1L3, ZNF382, RFXAP, RBM39, CWC25, ZIM2, ANXA9, MFSD11, BPNT1, GPN3, MAPT, PPP1R16B, ZNF250, RAD52, ZNF786, GNB5, MNS1, TARBP1, RBM6, PRKN, ZCWPW2, MAMDC2, IPCEF1, NFATC4, LPAR1, VXN, FAM107A, IL16, USP22, RNF112, CRY2, PLAGI, IQUB, PPP1R8, BNIP3L, VAX2, JDP2, PLEKHN1, HDAC5, C11ORF49, SLC4A2, STYXL1, TMEM179B, TAB1, ZNF446, TBXA2R, UNC45A, PCBP1, PHLDB3, KTI12, AKAP17A, PRCC, ZNF821, SPINDOC, HSF4, DEXI, HEXIM2, EHMT2, VPS72, DDX39A, KIF22, DPCD, LHPP, CD2BP2, CDK11B, GTF2H4, DGKZ, SARNP, ALYREF, SLC2A4RG, TEPSIN, AKAP8L, PPIE, STK19, FIBP, C60RF226, H2AFX, EGFL8, PSMD13, CACTIN, EXOSC7, C120RF57, THAP4, TMEM259, THOC6, AP5Z1, PQBP1, RBM10, C1ORF35, C19ORF24, SART1, CDC34, FASTK, POMP, PRPF6, PRPF19, BRK1, UFC1, SNRPA1, ZCCHC17, SNRPB2, PCP2, SSH3, SETD1A, WDR90, THEM6, U2AF2, RBM14, MAST3, LIMK1, SF3B4, DDX39B, RTEL1, ZNF165, MAPK12, PSMD8, CDK5RAP1, PDZK1IP1, SETD4, CHTOP, CDK11A, SRSF4, TBX19, RTN2, CCDC32, CYSRT1, IQCK, MPP1, MAMSTR, ILRUN, DBNDD1, EPHB6, TCF15, C60RF52, CYGB, CCDC85C, PHYHD1, ITPKC, CDC25C, RMI2, SNRNP40, HIST1H1E, ZC3H18.

[0071] In another aspect, the current disclosure provides a method of treating a Speckle signature associated cancer in a subject in need thereof, comprising:
[0072] a. obtaining a specimen of tumor tissue;
[0073] b. isolating and purifying RNA from the specimen;
[0074] c. performing RNA-seq using the RNA to determine the speckle signature of the tumor tissue; and
[0075] d. administering an effective amount of an inhibitor of expression for at least one speckle signature gene, thereby treating the cancer; In some embodiments, the method further comprises determining the nuclear localization profile of at least one speckle signature gene.

[0076] In some embodiments, a radial nuclear localization profile correlates with worse prognosis.

[0077] In some embodiments, the at least one inhibited speckle gene is associated with speckle Signature I.

[0078] In some embodiments, the inhibition of at least one gene associated with Speckle Signature I shifts the Speckle signature of the tumor tissue to Speckle Signature II.

[0079] In some embodiments, the at least one inhibited Speckle gene is associated with Speckle Signature II.

[0080] In some embodiments, the inhibition of at least one gene associated with Speckle Signature II shifts the Speckle signature of the tumor tissue to Speckle Signature I.

[0081] In some embodiments, shifting the Speckle signature of the tumor tissue improves prognosis.

[0082] In some embodiments, the cancer is selected from the group consisting of clear cell renal cell carcinoma, KMT2D wild type melanoma, TTN wild type lung adenocarcinoma, BRAF wild type thyroid cancer, and PIK3R1 mutant endometrial cancer.

[0083] In some embodiments, the inhibitor of Speckle signature gene expression is selected from the group consisting of an inhibitory RNA, a small molecule, a PROTAC, a CRISPR/Cas9 system, and any combination thereof.

[0084] In some embodiments, the inhibitory RNA is selected from the group consisting of an siRNA, and an shRNA or any combination thereof.

[0085] In some embodiments, the Speckle signature gene is SART1.

[0086] In some embodiments, the speckle signature gene is HBP1.

[0087] In some embodiments, the speckle signature gene is COPS4

[0088] In some embodiments, the speckle signature is determined by immunofluorescence of FFPE tumor samples.

[0089] In some embodiments, the speckle signature is determined by RNA or protein analysis of a subset of speckle protein genes comprising FIBP, PQBP1, SART1, THRAP4, FASTK, C19ORF24, CDC34, FBXL4, WRN, RNF169, TRIP12, SON, RBM27, BCLAF1, PRPF4B, SETD2, RBM26, EPC2, or any combination thereof.

[0090] In another aspect, the current disclosure provides a method of determining the prognosis of a speckle-related cancer in a subject in need thereof, comprising:
[0091] a. obtaining a specimen of cancer tissue;
[0092] b. preparing the tissue specimen such that nuclear localization of at least one speckle-related protein can be visualized and quantified; and
[0093] c. determining the nuclear localization profile of at least one speckle-related protein in the tissue, thereby indicating the severity of the speckle-related cancer;
[0094] wherein radial positioning speckle-related protein expression indicates a worse prognosis.

[0095] In some embodiments, the at least one speckle-related protein is selected from the group consisting of FIBP, PQBP1, SART1, THRAP4, FASTK, C19ORF24, CDC34, FBXL4, WRN, RNF169, TRIP12, SON, RBM27, BCLAF1, PRPF4B, SETD2, RBM26, EPC2, or any combination thereof.

[0096] In some embodiments, the at least one speckle-related protein is SON.

[0097] In some embodiments, the visualization and quantification of the speckle protein localization comprises immunofluorescence microscopy.

[0098] In some embodiments, the cancer is selected from the group consisting of clear cell renal cell carcinoma, KMT2D wild type melanoma, TTN wild type lung adenocarcinoma, BRAF wild type thyroid cancer, and PIK3R1 mutant endometrial cancer.

[0099] In another aspect, the current disclosure provides a method of treating a speckle-related cancer in a subject in need thereof, comprising:
[0100] a. performing RNA-seq using RNA purified from a tumor specimen from the subject to determine the speckle signature of the tumor tissue; and
[0101] b. administering an effective amount of an anticancer therapeutic, thereby treating the cancer;

[0102] wherein, the sensitivity of the tumor to the anticancer therapeutic correlates with the speckle signature of the tumor tissue.

[0103] In some embodiments, the method further comprises determining the nuclear localization profile nuclear speckles.

[0104] In some embodiments, the speckle signature is associated with speckle signature I.

[0105] In some embodiments, the speckle signature is associated with speckle Signature II.

[0106] In some embodiments, choosing a speckle signature correlated treatment strategy improves treatment prognosis.

[0107] In some embodiments, the cancer is selected from the group consisting of clear cell renal cell carcinoma, neuroblastoma, KMT2D wild type melanoma, TTN wild type lung adenocarcinoma, BRAF wild type thyroid cancer, and PIK3R1 mutant endometrial cancer.

[0108] In some embodiments, the cancer is clear cell renal cell carcinoma.

[0109] In some embodiments, the anticancer therapeutic is selected from the group consisting of an a biologic, a small molecule, an immunotherapy, and any combination thereof.

[0110] In some embodiments, immunotherapy is an immune checkpoint inhibitor.

[0111] In some embodiments, the immune checkpoint inhibitor is an inhibitor of PD-1.

[0112] In some embodiments, the PD-1 inhibitor is nivolumab.

[0113] In some embodiments, the anticancer therapeutic is an inhibitor of HIF-2α.

[0114] In some embodiments, the inhibitor of HIF-2α is PT2399.

[0115] In some embodiments, the speckle signature is determined by the nuclear localization profile of nuclear speckles.

[0116] In some embodiments, the nuclear localization profile is determined by immunofluorescence of FFPE tumor samples.

[0117] In some embodiments, the speckle signature is determined by RNA or protein analysis of a subset of speckle protein genes comprising FIBP, PQBP1, SART1, THRAP4, FASTK, C19ORF24, CDC34, FBXL4, WRN, RNF169, TRIP12, SON, RBM27, BCLAF1, PRPF4B, SETD2, RBM26, EPC2, or any combination thereof.

### BRIEF DESCRIPTION OF THE DRAWINGS

[0118] The following detailed description of specific embodiments of the invention will be better understood when read in conjunction with the appended drawings. For the purpose of illustrating the invention, there are shown in the drawings exemplary embodiments. It should be understood, however, that the invention is not limited to the precise arrangements and instrumentalities of the embodiments shown in the drawings.

[0119] FIG. 1 illustrates the mapping of the critical amino acids for p53-mediated speckle association of p53 target gene, p21. Scanning point mutations spanning the p53 second transactivation domain and proline rich domain identified critical amino acids for p53-mediated speckle association of p53 target gene, p21. Distance of the p21 genomic locus was measured by immunoDNA-FISH upon wild type (WT) or mutant induced expression in Saos2 cells using doxycycline to induce p53 expression for 3 hours. The D57A mutation improved p53-mediated speckle association of p21 (p<0.01). The T81A mutation compromised p53-mediated speckle association of p21 (p<0.0005).

[0120] FIG. 2 is a diagram of the p53 proline-rich domain amino acid sequence and surrounding regions. The deletion that compromised p53-mediated speckle association of p21 in recently published studies is underlined. Specific amino acid locations within p53 are indicated above the sequence. Hydrophobic amino acids are highlighted in red; acidic amino acids are highlighted in dark blue; phosphorylatable amino acids are highlighted in light blue. The D57 and T81 amino acids that affect p53-mediated speckle association (see FIG. 1) are in white text.

[0121] FIG. 3 illustrates that the charged state of p53 amino acid positions 55, 57, and 81 dictates p53 ability to mediate speckle association of target gene, p21. Distance of the p21 genomic locus was measured by immunoDNA-FISH under p53 null conditions or upon wild type (WT) or mutant-induced expression in Saos2 cells using doxycycline to induce p53 expression for 3 hours. Speckles were stained with the speckle-marker protein, SON, and the distance of the p21 locus and the nearest speckle was measured. Mutation of T55 to unphosphorylatable A did not alter speckle association status, but mutation of T55 to phosphomimetic D compromised speckle association. Eliminating the negative charge of D57 improved speckle association. Unphosphorylatable and phosphomimetic mutations of T81 had the opposite effect as compared to T55 mutations: T81A compromised speckle association (as in FIG. 1), while the T81D mutation was competent at speckle association. These results indicate that the distribution of charge within the speckle targeting motif is critical for speckle targeting capacities of p53.

[0122] FIG. 4. illustrates the treatment of HeLa cells with the hypoxia mimic, CoCl2, results in increased speckle association of the HIF2A target gene CCND1. Speckle association was measured by immunoRNA-FISH, with sites of transcription defined as the overlap between intronic and exonic probe set spots, in untreated HeLa cells and in HeLa cells treated with CoCl2 to mimic hypoxic conditions.

[0123] FIGS. 5A-5B illustrates on target activity of HIF2A-inhibitor, PT2399. (FIG. 5A) RNA-seq in DMSO control and during a PT2399 time course reveals gene regulated by HIF as the top decreasing genes (GO analysis not shown), and shows that the majority of genes are decreasing with HIF2A inhibition, consistent with HIF2A being a transcriptional activator. (FIG. 5B) ChIP-seq in DMSO control or PT2399 treatment reveals a loss of HIF2A-specific binding upon PT2399 inhibition, confirming on target activity of PT2399 in 786O cells. The top enriched transcription factor binding motif in the DMSO control was HIF2A.

[0124] FIG. 6 illustrates that SON TSA-seq reveals regulation of speckle association by HIF2A. Speckle association as measured by SON TSA-seq decreased at the HIF2A-responsive gene DDIT4 upon HIF2A inhibition (left). HIF2A binding sites are shown as lines above genome-browser tracks. HIF2A alters speckle association of its responsive genes to varying extents (right). In total, 175 of 697 HIF2A responsive genes were found to have HIF2A-regulated changes in SON TSA-seq signal.

[0125] FIG. 7. Local alignment between p53 and HIF2A identified the strongest region of homology to the p53 proline rich domain, identifying it as a speckle targeting motif present in both proteins. Full length p53 and full length HIF2A peptide sequences were aligned using a local similarity pairwise alignment tool, EMBOSS Matcher, which revealed 37.9% identity, 55.2% similarity between p53 amino acids 62-90 (amino acids 57-102 are shown in displayed alignment) and HIF2A amino acids 450-478 (HIF2A_1; amino acids 445-490 are shown in displayed alignment). After definition of the speckle targeting motif, a second speckle targeting motif was identified in HIF2A (HIF2A_2; amino acids 766-811 are shown in displayed alignment).

[0126] FIG. 8 is a diagram of the network of protein-protein interactions among proteins that contain speckle targeting motif (from STRINGDB). Network edges represent physical protein interactions. The network is significantly more interconnected than expected by random chance (STRING-DB; p<1⁻¹⁶). The network is enriched for “Regulation of transcription by RNA polymerase II” (top Biological Process, GO, FDR<1⁻²⁸; highlighted in red), “DNA-binding transcription factor activity, RNA polymerase II-specific” (top Molecular Function, GO, FDR<1⁻²⁷), and “Nuclear chromatin” (top Cellular Compartment, GO, FDR<1⁻¹⁹).

[0127] FIG. 9 is a diagram illustrating that nuclear proteins (red) among proteins that contain speckle targeting motif Same protein network as in FIG. 8 with the nuclear compartment proteins highlighted in red (FDR enrichment <1⁻¹⁵) and “Developmental disorder of mental health” disease gene association in blue (FDR enrichment <0.005).

[0128] FIG. 10 is a diagram illustrating the speckle targeting domain of HOXB13 with familial prostate cancer mutations indicated with arrows.

[0129] FIG. 11 illustrates the loss of speckle association at HIF2A-responsive genes upon HIF2A inhibition with PT2399 in 786O cells. CCND1 and DDIT4 become more distal to speckles upon HIF2A inhibition (left). Under DMSO HIF2A active conditions, CCND1 and DDIT4 show the characteristic L-shaped relationship between distance to speckle and amount of nascent RNA within transcription sites (as estimated by the intensity of exonic RNA-FISH spot at the site of transcription [defined by overlap between exonic and intronic RNA-FISH spot] relative to the median intensity of smRNA-FISH exonic spot within the same cell), consistent with previous observations of p53-mediated speckle association that speckle association results in boosted RNA production. Treatment of cells with PT2399 abolishes this L-shaped distribution (right scatterplot).

[0130] FIG. 12 illustrates that the inhibition of HIF2A with PT2399 does not alter speckle association of HIF2A-responsive genes in A498 cells. ImmunoRNA-FISH was performed as in FIG. 11. However, in contrast to 786O cells, A498 cells do not display HIF2A dependent changes in gene-speckle association, and do not show the characteristic L-shaped relationship between nascent RNA within transcription sites and speckle distances.

[0131] FIG. 13 is a diagram illustrating the overlap between HIF2A-responsive genes in 786O cells and A498 cells.

[0132] FIG. 14 illustrates that expression of speckle protein genes in VHL-mutated ccRCC falls into three tissue clusters with distinct speckle protein gene expression patterns. Speckle protein genes show one of two dysfunction patterns compared to tissue matched controls. speckle Signature I patients (top cluster) show opposite speckle protein gene expression patterns compared to speckle Signature II patients (bottom cluster).

[0133] FIG. 15 illustrates that patient speckle protein gene expression signature is significantly associated with ccRCC tumor stage, metastasis status, and overall survival probability, with patients with speckle Signature I as defined in FIG. 14 enriched among patients with later stage tumors, metastatic disease, and poorer survival.

[0134] FIG. 16 illustrates that the top mutated genes in ccRCC differ in expression between patient speckle signature groups. Displayed on the left is the heatmap of Z-scores of the median expression of the top mutated genes in each sample group. Genes that were higher in tumor versus normal tended to be higher in tumors with speckle Signature I versus II. Reciprocally, genes that are lower in ccRCC versus normal tissue tend to be lower in speckle Signature I versus II. On the right is a boxplot representation of the highly mutated ccRCC gene PBRM1 showing lower expression in patients with speckle signature I. I—speckle Signature I patient group; N—matched adjacent tissue; II—speckle Signature II patient group.

[0135] FIG. 17 illustrates that speckle signature corresponds to altered patterns of HIF2A gene expression. Heatmap showing Z-scores of the median expression of HIF2A-responsive genes defined by RNA-seq of PT2399 treatment in 786O cells and A498 cells. I—speckle Signature I patient group; N—matched adjacent tissue; II—speckle Signature II patient group.

[0136] FIG. 18 illustrates that the observed patient biases between speckle Signature I and II patients of HIF2A-responsive genes is highly correlated with DNA-speckle association. Displayed on the right are the four HIF2A-responsive gene cluster from FIG. 17, showing that the signature I-biased HIF2A-responsive clusters i and iv have significantly higher speckle association than the signature II-biased HIF2A-responsive clusters ii and iii as determined from the amount of signal from SON TSA-seq genome-wide measurements of speckle association in 786O cells. Displayed on the right is a scatterplot showing the ratio of the median expression of each HIF2A-responsive gene in the Signature I to the Signature II patient group (x-axis) versus the SON TSA-seq speckle signal (y-axis). Together these data demonstrate that the speckle Signature I patient group preferentially expresses speckle-associating HIF2A-responsive genes, while the speckle Signature II patient group preferentially expresses non-speckle-associating HIF2A-responsive genes.

[0137] FIG. 19 illustrates that 786O-specific HIF2A-responsive genes tend to be higher in the speckle Signature I patient group; A498-specific HIF2A-responsive genes tend to be higher in the Signature II patient group. Groups of HIF2A-responsive genes (see FIG. 13) and their expression ratio between the two speckle signature patient groups defined as in FIG. 14.

[0138] FIG. 20 illustrates that knockdown of SART1 resulted in decreased expression of speckle-associating genes (Group 10) and increased expression of non-speckle-associated genes (Group 1) in 786O cells. Log 2 fold change is shown relative to a nontargeting siRNA control. Results are similar for the two SART1 siRNAs used, siRNA4 (left) and siRNA6 (right).

[0139] FIG. 21 illustrates that genes that decrease upon SART1 knockdown have higher levels of speckle association; genes that increase upon SART1 knockdown have lower levels of speckle association. Increasing and decreasing genes were combined between the two SART1 siRNAs, not significant genes were included only if they were not significant in each of the siRNA conditions.

[0140] FIG. 22 illustrates that knockdown of SART1 in 786O cells results in decreased expression of signature I-biased genes (Groups 6-10) and increased expression of Signature II-biased genes (Groups 1-4). These data demonstrate that SART1 knockdown is sufficient to transform 786O cells toward a speckle signature II-like expression phenotype.

[0141] FIG. 23 illustrates that genes decreasing upon SART1 knockdown have higher expression in the speckle Signature I patient group, while genes increasing upon SART1 knockdown have higher expression in the speckle Signature II patient group. These data demonstrate that SART1 knockdown is sufficient to transform 786O cells toward a speckle signature II-like expression phenotype.

[0142] FIG. 24 illustrates that knockdown of SART1 results in a global upregulation of Signature II speckle protein genes. The RNA-seq expression fold change of Signature I and Signature II speckle protein genes was examined in each SART1 knockdown (kd4 and kd6) relative to the non-targeting control (NTC). SART1 knockdown resulted in a slight overall decrease in the expression of other Signature I speckle protein genes (ttest with fold change of 0 as null hypothesis p<0.05), and a major overall increase in Signature II speckle protein genes (ttest with fold change of 0 as null hypothesis p<1e-5). These data suggest a speckle signature regulatory circuit.

[0143] FIG. 25 illustrates that knockdown of HBP1 Signature II speckle protein gene shifts A498 cells towards a signature I-like expression phenotype.

[0144] FIG. 26 illustrates that knockdown of COPS4 Signature II speckle protein gene shifts A498 cells towards a signature I-like expression phenotype.

[0145] FIG. 27 illustrates examples of two genes that have highly correlated expression with the speckle score, GADD45GIP1 (high in signature I) and LATS1 (high in signature II). Given the strong correlation with speckle score, expression of these genes may be genomic readouts of the speckle signature.

[0146] FIG. 28 illustrates that speckle Signature I is associated with poorer outcomes in KMT2D wild type melanoma.

[0147] FIG. 29 illustrates that speckle Signature II is associated with poorer outcomes in BRAF wild type thyroid cancer.

[0148] FIG. 30 illustrates that speckle Signature I is associated with poorer outcomes in PIK3R1 mutant endometrial cancer.

[0149] FIG. 31 illustrates that speckle Signature II is associated with poorer outcomes in TTN wild type lung adenocarcinomas.

[0150] FIG. 32 illustrates that mutated p53 is associated with poorer survival in speckle Signature I lung adenocarcinomas, but does not reach statistical significance in speckle Signature II lung adenocarcinomas.

[0151] FIG. 33 is a table illustrating Enriched Biological Processes from STRING-DB analysis of the speckle target motif-containing proteins.

[0152] FIG. 34 is a table illustrating Enriched Molecular Functions from STRING-DB analysis of the speckle target motif-containing proteins.

[0153] FIG. 35 is a table illustrating Enriched Cellular Components from STRING-DB analysis of the speckle target motif-containing proteins.

[0154] FIGS. 36A-36G-1 are a table illustrating speckle protein genes and their individual ability to predict patient outcomes in the kirc TCGA dataset (as per Xena browser), whether poor prognosis is associated with high or low expression of that speckle protein gene, the p-value of the correlation between gene expression and tumor pathology grade, the athology grade associated with high speckle protein gene expression, and our assessment of the degree of speckle enrichment of the speckle protein genes from the Human Protein Atlas-designated speckle resident proteins. The absence of values indicates nonsignificant p-values.

[0155] FIGS. 37A-37E are a table illustrating speckle protein genes contributing most to patient variation for 20 cancer types.

[0156] FIGS. 38A-38D is a table illustrating the number of overlapping Signature I speckle protein genes between each cancer type (top) and the p-values of the significance of the overlap (bottom).

[0157] FIG. 39 is a table illustrating the number of overlapping Signature II speckle protein genes between each cancer type (top) and the p-values of the significance of the overlap (bottom).

[0158] FIG. 40 is a diagram illustrating aspects of nuclear speckle staining positioning within the nucleus which were used in the correlation with patient prognosis and survival.

[0159] FIG. 41 illustrates Kaplan Meier plots showing survival statistics for the fraction of SON signal in each radial distribution bin. Bin 1 of 4 represents the center bin of the nucleus, with 2 of 4 being the second bin from center, 3 of 4 being the third bin from center, and 4 of 4 being the peripheral bin. Patient groups were split into the top or bottom 50% of each measurement based on the median value of all nuclei measured in that patient ccRCC sample.

[0160] FIG. 42 is a table of variables found to predict ccRCC survival.

[0161] FIG. 43 is a table and heatmap demonstrating how certain variables predictive of ccRCC survival correlate with one another.

[0162] FIG. 44 illustrates that SON localization is less central in ccRCC versus adjacent tissue.

[0163] FIG. 45 illustrates the scoring of SON nuclear staining localization.

[0164] FIG. 46 illustrates an example immunofluorescence microscopy images of SON (red) and DAPI (cyan) signal in ccRCC tumor samples with high fraction of SON at center (top) or high fraction SON at periphery (bottom). The alphanumerical code at the top right of each image indicates the sample location on the tissue microarray.

[0165] FIG. 47 illustrates violin plots showing the fraction of SON signal in the center of the nucleus (FractAtD1of4; left) and at the nuclear periphery (FractAtD4of4; right) in adjacent tissues and ccRCC samples separated by tumor grade.

[0166] FIG. 48 is a Kaplan Meier plot showing survival for the fraction of SON signal in the center of the nucleus (FractAtD1of4) for Grade 1, Grade 1/2, and Grade 2 ccRCC patients (excluding Grade 2/3 and Grade 3).

[0167] FIG. 49 is a table showing Cox proportional hazard statistics in a survival model using Age, fraction SON at center of nucleus (FractAtD1of4 for SON), and the coefficient of variation of DAPI signal at the center of the nucleus (RadialCV1or4 for DAPI) as variables. A p-value of less than 0.05 is considered to be statistically significant. This model accounting for Age, SON radial positioning, and DAPI signal variation at the center of the nucleus is highly significant by all metrics tested (statistics below table).

[0168] FIG. 50 is a table showing Kaplan Meier statistics for each nuclear imaging variable measured. A p-value of less than 0.05 is considered to be statistically significant.

[0169] FIG. 51 is a graph illustrating that speckle signature correlates with patient outcomes in neuroblastoma using RNA-seq and survival data from the TARGET 2018 neuroblastoma cohort.

[0170] FIG. 52 illustrates the relationship between speckle signature score and the fraction of SON in the nucleus center from ccRCC tumor and adjacent normal samples in split for RNA and imaging (as in schematic, left). Tx—Xenograft tumor from mice; all four are from the same individual donor, different mice. T—primary tumor. N—tumor-adjacent normal samples.

[0171] FIG. 53 illustrates speckle signature scores calculated from RNAseq data of patient-derived mouse xenograft tumors that were resistant or sensitive to PT2399 HIF-2A inhibition. Data represents 18 resistant and 19 sensitive mouse xenograft tumors derived from 9 total individuals.

[0172] FIG. 54 illustrates ccRCC signature I (left) or Signature II (right) patient overall survival Kaplan Meier plots in response to nivolumab (PD1 inhibitor) or everolimus (mTOR inhibitor). Signature I nivolumab n=97; Signature I everolimus n=52; Signature II nivolumab n=84; Signature II everolimus n=78.

[0173] FIGS. 55A-55C illustrates the correlation of speckle gene signature to disease outcomes of various cancer types. FIG. 55A is a schematic showing the generation of multi-cancer speckle signatures. Proteins residing within speckles were identified, their expression evaluated, contributions to patient variation compared (Pearson's correlations), and consistent speckle protein gene contributors to patient variation were identified. FIG. 55B illustrates heatmaps showing z-scores of speckle signature protein gene RNA expression in melanoma (SKCM), breast cancer (BRCA), and renal cell carcinoma (KIRC). Bar on left represents speckle scores. Bar above represents Signature I- (cyan) or Signature II (pink) high speckle protein genes. FIG. 55C illustrates Kaplan Meier plots separating cancer cohorts by the top and bottom 25% of speckle scores.

[0174] FIGS. 56A-56B illustrate that Signature I or II gene expression patterns correspond to differential functional pathways in many different cancer types. FIG. 55A. Example gene set enrichment plots for breast cancer (BRCA), melanoma (SKCM), and ccRCC (KIRC) for Hallmark (left) and KEGG (right) of gene expression biases between speckle Signature I and II patient groups. FIG. 56B illustrates Hallmark and KEGG gene set enrichment statistics for Signature I versus Signature II speckle patient groups. ccRCC (KIRC) is in red text.

### DETAILED DESCRIPTION

### Definitions

[0175] Unless defined otherwise, all technical and scientific terms used herein have the same meaning as commonly understood by one of ordinary skill in the art to which the invention pertains. Although any methods and materials similar or equivalent to those described herein can be used in the practice for testing of the present invention, exemplary materials and methods are described herein. In describing and claiming the present invention, the following terminology will be used.

[0176] It is also to be understood that the terminology used herein is for the purpose of describing particular embodiments only, and is not intended to be limiting.

[0177] The articles “a”, “an”, and “the” are used herein to refer to one or to more than one (i.e., to at least one) of the grammatical object of the article. By way of example, “an element” means one element or more than one element.

[0178] “About” as used herein when referring to a measurable value such as an amount, a temporal duration, and the like, is meant to encompass variations of 20% or +10%, more preferably +5%, even more preferably +1%, and still more preferably +0.1% from the specified value, as such variations are appropriate to perform the disclosed methods.

[0179] A “biomarker” or “marker” as used herein generally refers to a nucleic acid molecule, clinical indicator, protein, or other analyte that is associated with a disease. In certain embodiments, a nucleic acid biomarker is indicative of the presence in a sample of a pathogenic organism, including but not limited to, viruses, viroids, bacteria, fungi, helminths, and protozoa. In various embodiments, a marker is differentially present in a biological sample obtained from a subject having or at risk of developing a disease (e.g., an infectious disease) relative to a reference. A marker is differentially present if the mean or median level of the biomarker present in the sample is statistically different from the level present in a reference. A reference level may be, for example, the level present in an environmental sample obtained from a clean or uncontaminated source. A reference level may be, for example, the level present in a sample obtained from a healthy control subject or the level obtained from the subject at an earlier timepoint, i.e., prior to treatment. Common tests for statistical significance include, among others, t-test, ANOVA, Kruskal-Wallis, Wilcoxon, Mann-Whitney and odds ratio. Biomarkers, alone or in combination, provide measures of relative likelihood that a subject belongs to a phenotypic status of interest. The differential presence of a marker of the invention in a subject sample can be useful in characterizing the subject as having or at risk of developing a disease (e.g., an infectious disease), for determining the prognosis of the subject, for evaluating therapeutic efficacy, or for selecting a treatment regimen.

[0180] By “agent” is meant any nucleic acid molecule, small molecule chemical compound, antibody, or polypeptide, or fragments thereof.

[0181] By “alteration” or “change” is meant an increase or decrease. An alteration may be by as little as 1%, 2%, 3%, 4%, 5%, 10%, 20%, 30%, or by 40%, 50%, 60%, or even by as much as 70%, 75%, 80%, 90%, or 100%.

[0182] By “biologic sample” is meant any tissue, cell, fluid, or other material derived from an organism.

[0183] The term “co-activator” refers to a protein that binds indirectly to DNA that positively regulates gene expression.

[0184] As used herein, the terms “determining”, “assessing”, “assaying”, “measuring” and “detecting” refer to both quantitative and qualitative determinations, and as such, the term “determining” is used interchangeably herein with “assaying,” “measuring,” and the like. Where a quantitative determination is intended, the phrase “determining an amount” of an analyte and the like is used. Where a qualitative and/or quantitative determination is intended, the phrase “determining a level” of an analyte or “detecting” an analyte is used.

[0185] By “detectable moiety” is meant a composition that when linked to a molecule of interest renders the latter detectable, via spectroscopic, photochemical, biochemical, immunochemical, or chemical means. For example, useful labels include radioactive isotopes, magnetic beads, metallic beads, colloidal particles, fluorescent dyes, electron-dense reagents, enzymes (for example, as commonly used in an ELISA), biotin, digoxigenin, or haptens.

[0186] A “disease” is a state of health of an animal wherein the animal cannot maintain homeostasis, and wherein if the disease is not ameliorated then the animal's health continues to deteriorate. In contrast, a “disorder” in an animal is a state of health in which the animal is able to maintain homeostasis, but in which the animal's state of health is less favorable than it would be in the absence of the disorder. Left untreated, a disorder does not necessarily cause a further decrease in the animal's state of health.

[0187] “Effective amount” or “therapeutically effective amount” are used interchangeably herein, and refer to an amount of a compound, formulation, material, or composition, as described herein effective to achieve a particular biological result or provides a therapeutic or prophylactic benefit. Such results may include, but are not limited to, anti-tumor activity as determined by any means suitable in the art.

[0188] “Encoding” refers to the inherent property of specific sequences of nucleotides in a polynucleotide, such as a gene, a cDNA, or an mRNA, to serve as templates for synthesis of other polymers and macromolecules in biological processes having either a defined sequence of nucleotides (i.e., rRNA, tRNA and mRNA) or a defined sequence of amino acids and the biological properties resulting therefrom. Thus, a gene encodes a protein if transcription and translation of mRNA corresponding to that gene produces the protein in a cell or other biological system. Both the coding strand, the nucleotide sequence of which is identical to the mRNA sequence and is usually provided in sequence listings, and the non-coding strand, used as the template for transcription of a gene or cDNA, can be referred to as encoding the protein or other product of that gene or cDNA.

[0189] By “fragment” is meant a portion of a nucleic acid or polypeptide molecule. This portion contains, preferably, at least 10%, 20%, 30%, 40%, 50%, 60%, 70%, 80%, or 90% of the entire length of the reference nucleic acid molecule or polypeptide. A fragment may contain 5, 10, 15, 20, 30, 40, 50, 60, 70, 80, 90, 100 or more nucleotides or amino acids.

[0190] “Homologous” as used herein, refers to the subunit sequence identity between two polymeric molecules, e.g., between two nucleic acid molecules, such as, two DNA molecules or two RNA molecules, or between two polypeptide molecules. When a subunit position in both of the two molecules is occupied by the same monomeric subunit; e.g., if a position in each of two DNA molecules is occupied by adenine, then they are homologous at that position. In some cases, homology can also be defined as analogous subunit positions in two molecules, such as polypeptides, having biochemically similar residues (e.g. a serine and/or a threonine, as both have polar and uncharged side chains). The homology between two sequences is a direct function of the number of matching or homologous positions; e.g., if half (e.g., five positions in a polymer ten subunits in length) of the positions in two sequences are homologous, the two sequences are 50% homologous; if 90% of the positions (e.g., 9 of 10), are matched or homologous, the two sequences are 90% homologous.

[0191] “Hybridization” means hydrogen bonding, which may be Watson-Crick, Hoogsteen or reversed Hoogsteen hydrogen bonding, between complementary nucleobases. For example, adenine and thymine are complementary nucleotides that pair through the formation of hydrogen bonds.

[0192] “Identity” as used herein refers to the subunit sequence identity between two polymeric molecules particularly between two amino acid molecules, such as, between two polypeptide molecules. When two amino acid sequences have the same residues at the same positions; e.g., if a position in each of two polypeptide molecules is occupied by an Arginine, then they are identical at that position. The identity or extent to which two amino acid sequences have the same residues at the same positions in an alignment is often expressed as a percentage. The identity between two amino acid sequences is a direct function of the number of matching or identical positions; e.g., if half (e.g., five positions in a polymer ten amino acids in length) of the positions in two sequences are identical, the two sequences are 50% identical; if 90% of the positions (e.g., 9 of 10), are matched or identical, the two amino acids sequences are 90% identical.

[0193] As used herein, an “instructional material” includes a publication, a recording, a diagram, or any other medium of expression which can be used to communicate the usefulness of the compositions and methods of the invention. The instructional material of the kit of the invention may, for example, be affixed to a container which contains the nucleic acid, peptide, and/or composition of the invention or be shipped together with a container which contains the nucleic acid, peptide, and/or composition. Alternatively, the instructional material may be shipped separately from the container with the intention that the instructional material and the compound be used cooperatively by the recipient.

[0194] The terms “isolated,” “purified,” or “biologically pure” refer to material that is free to varying degrees from components which normally accompany it as found in its native state. “Isolate” denotes a degree of separation from original source or surroundings. “Purify” denotes a degree of separation that is higher than isolation. A “purified” or “biologically pure” protein is sufficiently free of other materials such that any impurities do not materially affect the biological properties of the protein or cause other adverse consequences. That is, a nucleic acid or peptide of this invention is purified if it is substantially free of cellular material, viral material, or culture medium when produced by recombinant DNA techniques, or chemical precursors or other chemicals when chemically synthesized. Purity and homogeneity are typically determined using analytical chemistry techniques, for example, polyacrylamide gel electrophoresis or high-performance liquid chromatography. The term “purified” can denote that a nucleic acid or protein gives rise to essentially one band in an electrophoretic gel. For a protein that can be subjected to modifications, for example, phosphorylation or glycosylation, different modifications may give rise to different isolated proteins, which can be separately purified.

[0195] By “marker profile” is meant a characterization of the signal, level, expression or expression level of two or more markers (e.g., polynucleotides).

[0196] By the term “microbe” is meant any and all organisms classed within the commonly used term “microbiology,” including but not limited to, bacteria, viruses, fungi and parasites.

[0197] By the term “microarray” is meant a collection of nucleic acid probes immobilized on a substrate. As used herein, the term “nucleic acid” refers to deoxyribonucleotides, ribonucleotides, or modified nucleotides, and polymers thereof in single- or double-stranded form. The term encompasses nucleic acids containing known nucleotide analogs or modified backbone residues or linkages, which are synthetic, naturally occurring, and non-naturally occurring. Nucleic acid molecules useful in the methods of the invention include any nucleic acid molecule that specifically binds a target nucleic acid (e.g., a nucleic acid biomarker). Such nucleic acid molecules need not be 100% identical with an endogenous nucleic acid sequence, but will typically exhibit substantial identity. Polynucleotides having “substantial identity” to an endogenous sequence are typically capable of hybridizing with at least one strand of a double-stranded nucleic acid molecule. By “hybridize” is meant pair to form a double-stranded molecule between complementary polynucleotide sequences (e.g., a gene described herein), or portions thereof, under various conditions of stringency. (See, e.g., Wahl, G. M. and S. L. Berger (1987) Methods Enzymol. 152:399; Kimmel, A. R. (1987) Methods Enzymol. 152:507).

[0198] By the term “modulating,” as used herein, is meant mediating a detectable increase or decrease in the level of a response in a subject compared with the level of a response in the subject in the absence of a treatment or compound, and/or compared with the level of a response in an otherwise identical but untreated subject. The term encompasses perturbing and/or affecting a native signal or response thereby mediating a beneficial therapeutic response in a subject, preferably, a human.

[0199] In the context of the present invention, the following abbreviations for the commonly occurring nucleic acid bases are used. “A” refers to adenosine, “C” refers to cytosine, “G” refers to guanosine, “T” refers to thymidine, and “U” refers to uridine.

[0200] The term “nuclear speckle” refers to the specific type of membrane-less body or compartment within the cell nucleus. Nuclear speckle structures, which are also called interchromatin granule clusters, are sites of gene expression, including transcription, RNA splicing factor storage and modification, as well as RNA metabolism, that is marked by high enrichment of the protein SON and/or the protein SRRM2.

[0201] The term “nuclear speckle protein” refers to a protein that resides within nuclear speckles.

[0202] “Parenteral” administration of a composition includes, e.g., subcutaneous (s.c.), intravenous (i.v.), intramuscular (i.m.), or intrasternal injection, or infusion techniques.

[0203] As used herein, the terms “peptide,” “polypeptide,” and “protein” are used interchangeably, and refer to a compound comprised of amino acid residues covalently linked by peptide bonds. A protein or peptide must contain at least two amino acids, and no limitation is placed on the maximum number of amino acids that can comprise a protein's or peptide's sequence. Polypeptides include any peptide or protein comprising two or more amino acids joined to each other by peptide bonds. As used herein, the term refers to both short chains, which also commonly are referred to in the art as peptides, oligopeptides and oligomers, for example, and to longer chains, which generally are referred to in the art as proteins, of which there are many types. “Polypeptides” include, for example, biologically active fragments, substantially homologous polypeptides, oligopeptides, homodimers, heterodimers, variants of polypeptides, modified polypeptides, derivatives, analogs, fusion proteins, among others. The polypeptides include natural peptides, recombinant peptides, synthetic peptides, or a combination thereof.

[0204] By “reference” is meant a standard of comparison. As is apparent to one skilled in the art, an appropriate reference is where an element is changed in order to determine the effect of the element. In one embodiment, the level of a target nucleic acid molecule present in a sample may be compared to the level of the target nucleic acid molecule present in a clean or uncontaminated sample. For example, the level of a target nucleic acid molecule present in a sample may be compared to the level of the target nucleic acid molecule present in a corresponding healthy cell or tissue or in a diseased cell or tissue (e.g., a cell or tissue derived from a subject having a disease, disorder, or condition).

[0205] As used herein, the term “sample” includes a biologic sample such as any tissue, cell, fluid, or other material derived from an organism.

[0206] By “specifically binds” is meant a compound (e.g., nucleic acid probe or primer) that recognizes and binds a molecule (e.g., a nucleic acid biomarker), but which does not substantially recognize and bind other molecules in a sample, for example, a biological sample.

[0207] The term “speckle targeting motif” refers to a peptide sequence or collection of related peptide sequences found within proteins that are required for the DNA nuclear speckle targeting ability of the transcription factor proteins.

[0208] By “substantially identical” is meant a polypeptide or nucleic acid molecule exhibiting at least 50% identity to a reference amino acid sequence (for example, any one of the amino acid sequences described herein) or nucleic acid sequence (for example, any one of the nucleic acid sequences described herein). Preferably, such a sequence is at least 60%, and more preferably more, such as 80% or 85%, and more preferably 90%, 95%, 96%, 97%, 98%, or even 99% or more identical at the amino acid level or nucleic acid to the sequence used for comparison.

[0209] Sequence identity and homology is typically measured using sequence analysis software (for example, Sequence Analysis Software Package of the Genetics Computer Group, University of Wisconsin Biotechnology Center, 1710 University Avenue, Madison, Wis. 53705, BLAST, BESTFIT, GAP, or PILEUP/PRETTYBOX programs). Such software matches identical or similar sequences by assigning degrees of homology to various substitutions, deletions, and/or other modifications. Conservative substitutions typically include substitutions within the following groups: glycine, alanine; valine, isoleucine, leucine; aspartic acid, glutamic acid, asparagine, glutamine; serine, threonine; lysine, arginine; and phenylalanine, tyrosine. In an exemplary approach to determining the degree of identity, a BLAST program may be used, with a probability score between e⁻³ and e⁻¹⁰⁰ indicating a closely related sequence. In another exemplary approach, a BLOSOM substitution matrix may be used to score conservative and/or non-conservative substitutions.

[0210] By the term “substantially microbial hybridization signature” is a relative term and means a hybridization signature that indicates the presence of more microbes in a tumor sample than in a reference sample. By the term “substantially not a microbial hybridization signature” is a relative term and means a hybridization signature that indicates the presence of less microbes in a reference sample than in a tumor sample.

[0211] By “subject” is meant a mammal, including, but not limited to, a human or non-human mammal, such as a bovine, equine, canine, ovine, feline, mouse, or monkey. The term “subject” may refer to an animal, which is the object of treatment, observation, or experiment (e.g., a patient).

[0212] By “target nucleic acid molecule” is meant a polynucleotide to be analyzed. Such polynucleotide may be a sense or antisense strand of the target sequence. The term “target nucleic acid molecule” also refers to amplicons of the original target sequence. In various embodiments, the target nucleic acid molecule is one or more nucleic acid biomarkers.

[0213] A “target site” or “target sequence” refers to a genomic nucleic acid sequence that defines a portion of a nucleic acid to which a binding molecule may specifically bind under conditions sufficient for binding to occur.

[0214] The term “therapeutic” as used herein means a treatment and/or prophylaxis. A therapeutic effect is obtained by suppression, remission, or eradication of a disease state.

[0215] As used herein, the terms “treat,” treating,” “treatment,” and the like refer to reducing or ameliorating a disorder and/or symptoms associated therewith. It will be appreciated that, although not precluded, treating a disorder or condition does not require that the disorder, condition or symptoms associated therewith be completely eliminated.

[0216] As used herein, the term “TSA-seq” or Tyramide Signal Amplification sequencing is a genetic mapping tool which estimates the mean chromosomal distances to defined nuclear structures, including nuclear speckles. TSA-seq makes use of the tyramide signal amplification staining method to generate biotin-tyramide free radicals, which are generated by peroxidases coupled to antibodies. The exponential decay in concentration of these free radicals, spreading radially from the antibody staining target, establishes a “cytological ruler,” allowing estimation of distance of chromosome loci from the staining target by measuring biotin labeling across the genome. TSA-seq can be used to determine interactions between gene loci and nuclear speckles.

[0217] By the term “tumor tissue sample” is meant any sample from a tumor in a subject including any solid and non-solid tumor in the subject.

[0218] Ranges: throughout this disclosure, various aspects of the invention can be presented in a range format. It should be understood that the description in range format is merely for convenience and brevity and should not be construed as an inflexible limitation on the scope of the invention. Accordingly, the description of a range should be considered to have specifically disclosed all the possible subranges as well as individual numerical values within that range. For example, description of a range such as from 1 to 6 should be considered to have specifically disclosed subranges such as from 1 to 3, from 1 to 4, from 1 to 5, from 2 to 4, from 2 to 6, from 3 to 6 etc., as well as individual numbers within that range, for example, 1, 2, 2.7, 3, 4, 5, 5.3, and 6. This applies regardless of the breadth of the range.

### Description

[0219] The present invention relates to compositions and methods for manipulating nuclear speckles, DNA-speckle contacts, and inducible DNA-speckle association to shift gene expression. In other embodiments, the present invention relates to using the speckle signature defined by the inventors as a prognostic indicator to define subject subclasses whom would benefit from particular therapeutic strategies. The compositions and methods of the present invention will be applied to human therapies that involve altered gene expression programs driven by nuclear speckles or by speckle-targeting transcription factors, including, but not limited to, human cancer such as clear cell renal cell carcinoma, neuroblastoma, melanoma, thyroid cancer, endometrial cancer, lung adenocarcinoma, cancers with gain-of-function p53 mutations, and cancers with wild type p53 where p53 activation is a therapeutic strategy.

### Inhibitors of DNA-Speckle Association

[0220] In some aspects, the present invention provides polypeptides and compositions for inhibiting transcription-factor driven DNA-speckle contacts by cellular proteins such as transcription factors, co-activators, and the like. In certain embodiments, the transcription factors which mediate association with DNA-speckles are p53 and HIF2A. It is also contemplated that the polypeptides and compositions of the invention can be used to inhibit the DNA-speckle association of any transcription factor that drives DNA-speckle association through the presence of a DNA-speckle targeting motif within the transcription factor (see Tables 1 and 2 for a non-limiting list of transcription factors and their putative speckle targeting motifs). Transcription factors which possess a DNA-speckle targeting motif include, but are not limited to key players in stem cell pluripotency that are manipulated in pluripotent stem cell therapies (OCT4, KLF4, and TOX4), commonly mutated tumor suppressors (KMT2C and KMT2D), neurogenesis and neurodegeneration-related factors transcription factors (HTT, NEUROD1), factors involved in T cell functions and T cell exhaustion (NFATC4, FLIT, TOX2, and HIVEP3), and a transcription factor with point mutations within the speckle targeting motif associated with familial risk of prostate cancer (HOXB13, (Beebe-Dimmer et al., 2015; Breyer et al., 2012; Dupont et al., 2021; Ewing et al., 2012; Heise et al., 2019; Wei et al., 2021)). The polypeptides, compositions, and methods disclosed herein are immediately relevant to cancer therapies for cancers which possess gain-of-function p53 mutations and HIF2A hyperactivation (e.g. clear cell renal cell carcinoma, pheochromocytomas, retinal hemagiomas).

### Speckle Targeting Blocking Peptide Components

[0221] In some aspects, the current invention provides an inhibitor of transcription factor/DNA-speckle association that is a polypeptide comprising a first polypeptide domain, a second polypeptide domain, and a third polypeptide domain wherein the first polypeptide domain comprises a cell penetrating peptide, the second polypeptide domain comprises a linker region, and the third polypeptide domain comprises a DNA-speckle targeting motif. In some aspects, the current invention also includes a fourth polypeptide domain that comprises a nuclear localization signal.

[0222] In some embodiments, the first polypeptide domain comprises a cell penetrating peptide. Unlike many small-molecule drugs, which can diffuse into cells through the plasma membrane, proteins including the polypeptides of the invention are relatively large and hydrophilic molecules and as such are not able to pass directly through the plasma membrane. Cell-penetrating peptides or domains are typically composed of 5 to 30 amino acids and are positively charged at physiological pH and induce the endocytosis of the peptide or the protein to which it is conjugated to by a number of different mechanisms including, but not limited to direct penetration, endosomal uptake, and endocytic pathways. In some embodiments, the cell penetrating peptide is an HIV TAT peptide. In some preferred embodiments, the HIV TAT peptide has an amino acid sequence of GRKKRRQRRRPQ (SEQ ID NO: 1731). It is also contemplated that the polypeptides of the current invention can utilize any number of cell penetrating peptides known in the art including penetratin, R8, transportan, and xentry among others. In some embodiments, the polypeptides of the current invention comprise modified cell-penetrating peptides, which can include but are not limited to cyclic R8 peptides, cyclic TAT peptides, and HA-TAT peptides, among others. In some embodiments, the polypeptides of the current invention are delivered with separate small peptides which aid and improve cell permeabilization. Examples of such cell permeabilization aids include but are not limited to Transportan, Mastoparan, KALA, Penetratin-Arg, Penetratin, or TAT-HA2 (Anaspec).

[0223] In some embodiments, the second polypeptide domain comprises a linker region. Linker regions or sequences are typically rich in glycine for flexibility, as well as serine or threonine for solubility and low steric hinderance. The linker can link the cell-penetrating domain to the DNA-speckle targeting motif domain of the polypeptides of the invention. Non-limiting examples of linkers are disclosed in Shen et al., Anal. Chem. 80(6):1910-1917 (2008) and WO 2014/087010, the contents of which are hereby incorporated by reference in their entireties. Various linker sequences are known in the art, including, without limitation, glycine serine (GS) linkers such as (GS)n, (GSGGS)n (SEQ ID NO: 1732), (GGGS)n (SEQ ID NO: 1733), and (GGGGS)n (SEQ ID NO: 1734), where n represents an integer of at least 1. Exemplary linker sequences can comprise amino acid sequences including, without limitation, GGSG (SEQ ID NO: 1735), GGSGG (SEQ ID NO: 1736), GSGSG (SEQ ID NO: 1737), GSGGG (SEQ ID NO: 1738), GGGSG (SEQ ID NO: 1739), GSSSG (SEQ ID NO: 1740), GGGGS (SEQ ID NO: 1741), GGGGSGGGGSGGGGS (SEQ ID NO: 1742) and the like. In some preferred embodiments, the linker sequence comprises the amino acid sequence GGSGGGSG (SEQ ID NO: 1743). It is also contemplated that the length and composition of the linker region can be optimized, including expanding or contracting the GGS repeat length, and by using other linkers, such as GIHGVPAAT (SEQ ID NO: 1744). Those of skill in the art would be able to select the appropriate linker sequence for use in the present invention.

[0224] In some embodiments, the fourth polypeptide domain comprises a nuclear localization signal (NLS). The NLS will assist the peptide to access the nuclear compartment. The term “NLS” or “nuclear localization signal” as used herein refers to an amino acid sequence, which identifies a cytoplasmic protein for import into the nucleus via a nuclear transport mechanism. Typically, this signal consists of one or more short sequences of positively charged amino acids (lysine or arginine) exposed on an exterior surface of the protein. Various nuclear localized proteins may share the same NLS. Non-binding examples of NLS sequences include the amino acid sequence PKKKRKV (SEQ ID NO: 1745) in the SV40 Large T-antigen and the amino acid sequence RRARRPRG (SEQ ID NO: 1746) from VP1 of the chicken anemia virus (CAV) which are both monopartite NLS, as well as bipartite NLS sequences in which the basic amino acid residues are present in two clusters, such as in NLS of nucleoplasmin, KR[PAATKKAGQA]KKKK (SEQ ID NO: 1747). There are many other types of NLS, which are known as “non-classical”, such as the acidic M9 domain of hnRNP A1, the sequence KIPIK in yeast transcription repressor Mata2, and the complex signals of U snRNPs among others. Thus, any type of NLS known in the art (classical or non-classical) may be used in combination with the current invention in order to direct the polypeptides of the current invention in order direct import into the nucleus of a target cell.

### DNA-Speckle Targeting Motif

[0225] In some embodiments, the current invention provides a polypeptide inhibitor of transcription factor/DNA-speckle association comprising a DNA-speckle targeting motif. The speckle targeting motif (STM) is polypeptide sequence which follows a distinct and defined pattern of amino acid residues (see Experimental Example 1 and Example 2) which acts to mediate the association of the transcription factor with DNA-speckles. Speckle targeting motifs comprise the amino acid pattern, x(30)-[TS]-P-x(30), wherein x is any amino acid and that:
[0226] 1. Do not contain four or more consecutive Proline residues.
[0227] 2. Contain Prolines in a minimum of three of the correctly spaced positions: amino acids 16, 21, 26, 36, 41, or 46
[0228] 3. At least five negative or phosphorylatable amino acids (D, E, T, S)
[0229] 4. At least five small or hydrophobic amino acids (A, M, V, F, L, I)
[0230] 5. Fewer than fifteen positively charged amino acids (R, H, K)

[0231] The currently defined consensus speckle targeting motif is 30 amino acids in length, spanning from amino acid 16 to amino acid 46 of the x(30)-[TS]-P-x(30) 62 amino acid peptide pattern that was extracted from the proteome (Table 1; all the speckle targeting motifs found in the genome). Here, additional amino acids to the central 30 amino acid STM are included for their potential to add specificity for individual transcription factor speckle targeting activity. Based on data that phosphorylation of the central S or T may be critical for speckle-associating functions of p53 (see Example 1; FIGS. 1 and 3), an expanded consensus speckle targeting motif is defined as x(30)-[TSED]-P-x(30), which includes the negatively charged amino acids, E and D, which would have similar biochemical properties to phosphorylated T or S (Table 2).

[0232] In some embodiments, the biochemical properties of the speckle targeting motif can be optimized to modulate speckle-targeting blocking activity including:
[0233] 1. Transcription factor specificity. The specificity of the composition to each transcription factor can be optimized, starting with using the unique amino acid features of each transcription factor STM. This includes their unique x amino acid composition, proline spacing, and extending past the core STM on either or both sides. Each of these features will be optimized (see also below).
[0234] 2. Proline spacing. The consensus speckle target motif constitutes the following spacing of prolines: PxxxxPxxxxPxxx[TSED]PxxxxPxxxxPxxxxP with P designating a Proline, x designating any other amino acid and [TSED] designating either a Threonine, Serine, Aspartate, or Glutamate. The number of spaced prolines, and their exact positions can be optimized.
[0235] 3. Speckle targeting motif length. Starting from the full 30 amino acid speckle targeting motif, the speckle targeting motif can be shortened or lengthened on either or both sides of the TP/SP/EP/DP motif.
[0236] 4. Charge and phosphomimetics. The central TSED can be optimized for charge and phosphomimickry, using T, S, E, or D as well as phospho-mimicking T and S synthetic amino acids
[0237] 5. Composition of x amino acids. The complexity and biochemical properties of x amino acids can be optimized, using naturally occurring speckle targeting motifs within transcription factors as guides.
[0238] 6. Proline isomerization. Proline residues are a special amino acid that covalently bond with the peptide backbone in one of two possible conformations (cis or trans). The specific conformation of each proline needed for speckle-targeting-blocking activities can be altered at each position using synthetic prolines that favor either the cis or the trans conformation.
[0239] 7. Number of tandem speckle targeting motifs. The STM can be repeated from one to any number of times within the same polypeptide to accomplish maximum activity. Multiple STMs in one protein occurs naturally in several STM-containing proteins, including HIF2A and KMT2D.

TABLE 1
List of speckle targeting motif containing
proteins according to x(30)-[TS]P-x(30).
Proteins with more than one speckle targeting motif are
designated by ProteinName_[0-number of motifs minus one].

| SEQ | | |
|---|---|---|
| ID | | |
| NO: | Name: | Sequence: |
| 1 | MUC17_0 | IPVITSTEASSSPTTAEGTSIPTSTYTEGSTPLTSTPASTMPV |
| | | ATSEMSTLSITPVDTSTLV |
| 2 | MUC17_1 | STEASSSPTTAEGTSIPTSTYTEGSTPLTSTPASTMPVATSE |
| | | MSTLSITPVDTSTLVTTSTE |
| 3 | MUC17_2 | TPVTNSTEARSSPTTSEGTSMPTSTPGEGSTPLTSMPDSTTP |
| | | VVSSEARTLSATPVDTSTPV |
| 4 | MUC17_3 | TQVATSTEASSPPPTAEVTSMPTSTPGERSTPLTSMPVRHT |
| | | PVASSEASTLSTSPVDTSTPV |
| 5 | MUC17_4 | TPVTTSTEACSSPTTSEGTSMPNSNPSEGTTPLTSIPVSTTPV |
| | | VSSEASTLSATPVDTSTPG |
| 6 | MUC17_5 | TPGTTSAEATSSPTTAEGISIPTSTPSEGKTPLKSIPVSNTPV |
| | | ANSEASTLSTTPVDSNSPV |
| 7 | MUC17_6 | TPVTTSTEARSSPTTSEGTSMPNSTPSEGTTPLTSIPVSTTPV |
| | | LSSEASTLSATPIDTSTPV |
| 8 | MUC17_7 | TPVTNSTEARSSPTTSEGTSMPTSTPSEGSTPFTSMPVSTMP |
| | | VVTSEASTLSATPVDTSTPV |
| 9 | MUC17_8 | TPVTTYSQAGSSPTTADDTSMPTSTYSEGSTPLTSVPVSTM |
| | | PVVSSEASTHSTTPVDTSTPV |
| 10 | MUC17_9 | TPVTTSTEASSSPTTAEGTSIPTSPPSEGTTPLASMPVSTTPV |
| | | VSSEAGTLSTTPVDTSTPM |
| 11 | MUC17_10 | SPVVTSTEISSSATSAEGTSMPTSTYSEGSTPLRSMPVSTKP |
| | | LASSEASTLSTTPVDTSIPV |
| 12 | MUC17_11 | IPVTTSTEASSSPTTAEVTSMPTSTPSETSTPLTSMPVNHTP |
| | | VASSEAGTLSTTPVDTSTPV |
| 13 | MUC17_12 | TPVTTSTEASSSPTTAEGTGIPISTPSEGSTPLTSIPVSTTPVA |
| | | IPEASTLSTTPVDSNSPV |
| 14 | MUC17 13 | SPVVTSTEVSSSPTPAEGTSMPISTYSEGSTPLTGVPVSTTP |
| | | VTSSAISTLSTTPVDTSTPV |
| 15 | MUC17_14 | STPVTTSTEATSSTTAEGTSIPTSTPSEGMTPLTSVPVSNTP |
| | | VASSEASILSTTPVDSNTPL |
| 16 | MUC17_15 | TPVTTSTEASLSPTTAEGTSIPTSSPSEGTTPLASMPVSTTPV |
| | | VSSEVNTLSTTPVDSNTLV |
| 17 | MUC17_16 | TLVTTSTEASSSPTIAEGTSLPTSTTSEGSTPLSIMPLSTTPV |
| | | ASSEASTLSTTPVDTSTPV |
| 18 | MUC17_17 | TPVTTSSPTNSSPTTAEVTSMPTSTAGEGSTPLTNMPVSTTP |
| | | VASSEASTLSTTPVDSNTFV |
| 19 | MYO15B_0 | HRLALRLAGLAGLGGMPRASPGGRSPQVPTSPVPGDPFDQ |
| | | EDETPDPKFAVVFPRIHRAGRA |
| 20 | MYO15B_1 | AFLRKIDPKDEALAKLGINGAHSSPPMLSPSPGKGPPPAVA |
| | | PRPKAPLQLGPSSSIKEKQGP |
| 21 | FAM178B | RPCSPASAPAPTSPKKPKIQAPGETFPTDWSPPPVEFLNPRV |
| | | LQASREAPAQRWVGVVGPQG |
| 22 | INPP5J_0 | HSSPEDPVLPRPPQTLPLDVGQGPSEPGTHSPGLLSPTFRPG |
| | | APSGQTVPPPLPKPPRSPSR |
| 23 | INPP5J_1 | DPVLPRPPQTLPLDVGQGPSEPGTHSPGLLSPTFRPGAPSG |
| | | QTVPPPLPKPPRSPSRSPSHS |
| 24 | COL15A1 | VAEILEAVTYTQASPKEAKVEPINTPPTPSSPFEDMELSGEP |
| | | VPEGTLETTNMSIIQHSSPK |
| 25 | SH3RF1 | PTAAARISELSGLSCSAPSQVHISTTGLIVTPPPSSPVTTGPS |
| | | FTFPSDVPYQAALGTLNPP |
| 26 | EZHIP | DENPSCGTGSERLAFQSRSGSPDPEVPSRASPPVWHAVRM |
| | | RASSPSPPGRFFLPIPQQWDES |
| 27 | CTAGE1 | EFKIKLLEKDPYGLDVPNTAFGRQHSPYGPSPLGWPSSETR |
| | | ASLYPPTLLEGPLRLSPLLPR |
| 28 | BPTF_0 | PTHAQSSKPQVAAQSQPQSNVQGQSPVRVQSPSQTRIRPST |
| | | PSQLSPGQQSQVQTTTSQPIP |
| 29 | BPTF_1 | QPQSNVQGQSPVRVQSPSQTRIRPSTPSQLSPGQQSQVQTT |
| | | TSQPIPIQPHTSLQIPSQGQP |
| 30 | NRXN3 | KMNNRDLKPQPDIVLLPLPTAYELDSTKLKSPLITSPMFRN |
| | | VPTANPTEPGIRRVPGASEVI |
| 31 | ANKHD1-EIF4EBP3 | PHFALLAAQTMQQIRHPRLPMAQFGGTFSPSPNTWGPFPV |
| | | RPVNPGNTNSSPKHNNTSRLPN |
| 32 | putative | LCLIPRNTGTPQRVLRPVVWSPPSRKKPVLSPHNSIMFGHL |
| | | SPVRIPCLRGKFNLQLPSLDD |
| 33 | C1orf94 | KNVLDKTRVTKDFLQDNLFSGPGPKEPTGLSPFLLLPPRPP |
| | | PARPDKLPELPAQKRQLPVFA |
| 34 | ITIH6_0 | KPGSLSHQNPDILPTNSRTQVPPVKPGIPASPKADTVKCVT |
| | | PLHSKPGAPSHPQLGALTSQA |
| 35 | ITIH6_1 | LSKTPKILLSLKPSAPPHQISTSISLSKPETPNPHMPQTPLPP |
| | | RPDRPRPPLPESLSTFPNT |
| 36 | KIAA1614 | GSINEEQPARDGGPRLPRPPAPGREYCNRGSPWPPEAEWT |
| | | LPDHDRGPLLGPSSLQQSPIHG |
| 37 | KRTAP10-10 | CTDSWRVVDCPESCCEPCCCAPAPSLTLVCTPVSCVSSPCC |
| | | QTACEPSACQSGYTSSCTTPC |
| 38 | IFITM10 | LGDPASTTDGAQEARVPLDGAFWIPRPPAGSPKGCFACVS |
| | | KPPALQAPAAPAPEPSASPPMA |
| 39 | MS4A15 | GLCPPPAILPTSMCQPPGIMQFEEPPLGAQTPRATQPPDLRP |
| | | VETFLTGEPKVLGTVQILIG |
| 40 | SP5 | PQKTHLQPSFGAAHELPLTPPADPSYPYEFSPVKMLPSSMA |
| | | ALPASCAPAYVPYAAQAALPP |
| 41 | FOXE1 | AARPPYPGAVYAGYAPPSLAAPPPVYYPAASPGPCRVFGL |
| | | VPERPLSPELGPAPSGPGGSCA |
| 42 | PRICKLE2 | EYAWVPPGLKPEQVHQYYSCLPEEKVPYVNSPGEKLRIKQ |
| | | LLHQLPPHDNEVRYCNSLDEEE |
| 43 | C7orf26_0 | LCTRDDLRTLCSRLPHNNLLQLVISGPVQQSPHAALPPGFY |
| | | PHIHTPPLGYGAVPAHPAAHP |
| 44 | C7orf26_1 | HNNLLQLVISGPVQQSPHAALPPGFYPHIHTPPLGYGAVPA |
| | | HPAAHPALPTHPGHTFISGVT |
| 45 | MAGEB17_0 | EKRRQARGEDQCLGGAQATAAEKEKLPSSSSPACQSPPQS |
| | | FPNAGIPQESQRASYPSSPASA |
| 46 | MAGEB17_1 | ARGEDQCLGGAQATAAEKEKLPSSSSPACQSPPQSFPNAGI |
| | | PQESQRASYPSSPASAVSLTS |
| 47 | ATP6V1FNB | ARLPLKLPTLHPKAPLSPPPAPKSAPSKVPSPVPEAPFQSEM |
| | | YPVPPITRALLYEGISHDFQ |
| 48 | PCDH9 | ATDGGQPPRSSTAKVTINVMDVNDNSPVVISPPSNTSFKLV |
| | | PLSAIPGSVVAEVFAVDVDTG |
| 49 | FAM131C | YLQDSLPSGPSQDDSLQAFSSPSPSPDSCPSPEEPPSTAGIPQ |
| | | PPSPELQHRRRLPGAQGPE |
| 50 | FAM221B | SAEDLQENHISESFLKPSTSETPLEPHTSESPLVPSPSQIPLE |
| | | AHSPETHQEPSISETPSET |
| 51 | TOX3 | QQLQQQLQQRLQLQQLQHMQHQSQPSPRQHSPVASQITSP |
| | | IPAIGSPQPASQQHQSQIQSQT |
| 52 | MAMSTR | EQISDPDPWISASDPPLAPALPSGTAPFLFSPGVLLPEPEYC |
| | | PPWRSPKKESPKISQRWRES |
| 53 | ZAN | CAQAGQAPAWRNRTFCPMRCPPGSSYSPCSSPCPDTCSSIN |
| | | NPRDCPKALPCAESCECQKGH |
| 54 | PCLO_0 | RPQTKQADIVRGESVKPSLPSPSKPPIQQPTPGKPPAQQPG |
| | | HEKSQPGPAKPPAQPSGLTKP |
| 55 | PCLO_1 | KTPAQQPGPAKPPTQQVGTPKPLAQQPGLQSPAKAPGPTK |
| | | TPVQQPGPGKIPAQQAGPGKTS |
| 56 | PCLO_2 | KPPTQQVGTPKPLAQQPGLQSPAKAPGPTKTPVQQPGPGK |
| | | IPAQQAGPGKTSAQQTGPTKPP |
| 57 | C22orf23 | IMDIMKRGDALPLQCSPTSSQRVLPSKQIASPIYLPPILAAR |
| | | PHLRPANMCQANGAYSREQF |
| 58 | HSFX1 | RNSRGQDHGLERVPFPPQLQSETYLHPADPSPAWDDPGST |
| | | GSPNLRLLTEEIAFQPLAEEAS |
| 59 | FAM13C | RNLLCEQPTVPRENGKPEAAGPEPSSSGEETPDAALTCLKE |
| | | RREQLPPQEDSKVTKQDKNLI |
| 60 | THAP8_0 | PLQKNTPLPQSPAIPVSGPVRLVVLGPTSGSPKTVATMLLT |
| | | PLAPAPTPERSQPEVPAQQAQ |
| 61 | THAP8_1 | SPAIPVSGPVRLVVLGPTSGSPKTVATMLLTPLAPAPTPER |
| | | SQPEVPAQQAQTGLGPVLGAL |
| 62 | PRR27 | VPPSRFFSAAAAPAAPPIAAEPAAAAPLTATPVAAEPAAG |
| | | APVAAEPAAEAPVGAEPAAEAP |
| 63 | LRRN4 | VLEPDISAASTPLASKLLGPFPTSWDRSISSPQPGQRTHATP |
| | | QAPNPSLSEGEIPVLLLDDY |
| 64 | KDF1 | QRLKSTMGSSFSYPDVKLKGIPVYPYPRATSPAPDADSCC |
| | | KEPLADPPPMRHSLPSTFASSP |
| 65 | NEXMIF | INGVKENDSEDQDVAMKSFAALEAAAPIQPTPVAQKETL |
| | | MYPRGLLPLPSKKPCMQSPPSPL |
| 66 | KLHDC7B | PGGGWPWVSREVPGTRSFGPAPDSTRPWLESPPQGRPLSS |
| | | QGPGATGAYDAGEAGADSSRDN |
| 67 | C19orf67 | EGSLPLDPGETPPPDALEPGTPPCGDPSRSTPPGRPGNPSEP |
| | | DPEDAEGRLAEARASTSSPK |
| 68 | RAB44_0 | TAHSELPQQDSLLVSLPSATPQAQVEAEGPTPGKSAPPRGS |
| | | PPRGAQPGAGAGPQEPTQTPP |
| 69 | RAB44_1 | SLLVSLPSATPQAQVEAEGPTPGKSAPPRGSPPRGAQPGAG |
| | | AGPQEPTQTPPTMAEQEAQPR |
| 70 | ZNF341_0 | SGTVEIQALGMQPYPPLEVPNQCVEPPVYPTPTVYSPGKQ |
| | | GFKPKGPNPAAPMTSATGGTVA |
| 71 | ZNF341_1 | IQALGMQPYPPLEVPNQCVEPPVYPTPTVYSPGKQGFKPK |
| | | GPNPAAPMTSATGGTVATFDSP |
| 72 | RTL10 | KEPPVLPSSTCSSKPGPVEPASSQPEEAAPTPVPRLSESANP |
| | | PAQRPDPAHPGGPKPQKTEE |
| 73 | IQCN_0 | KTLLQTYPVVSVTLPQTYPASTMTTTPPKTSPVPKVTIIKTP |
| | | AQMYPGPTVTKTAPHTCPMP |
| 74 | IQCN_1 | SVTLPQTYPASTMTTTPPKTSPVPKVTIIKTPAQMYPGPTV |
| | | TKTAPHTCPMPTMTKIQVHPT |
| 75 | ZNF653 | SPVGSSGLITQEGVHIPFDVHHVESLAEQGTPLCSNPAGNG |
| | | PEALETVVCVPVPVQVGAGPS |
| 76 | KRTAP10-11 | QVDDCPESCCEPPCSAPSCCAPAPSLSLVCTPVSCVSSPCC |
| | | QAACEPSACQSGCTSSCTPSC |
| 77 | TTBK1 | TNSLPNGPALADGPAPVSPLEPSPEKVATISPRRHAMPGSR |
| | | PRSRIPVLLSEEDTGSEPSGS |
| 78 | CCDC184 | GRDPEDEEEEEEEKEMPSPATPSSHCERPESPCAGLLGGDG |
| | | PLVEPLDMPDITLLQLEGEAS |
| 79 | UBQLN3_0 | QSLGTYLQGTASALSQSQEPPPSVNRVPPSSPSSQEPGSGQ |
| | | PLPEESVAIKGRSSCPAFLRY |
| 80 | UBQLN3_1 | SSTGHSTNLPDLVSGLGDSANRVPFAPLSFSPTAAIPGIPEP |
| | | PWLPSPAYPRSLRPDGMNPA |
| 81 | PRDM8 | STPAAASPVGAEKLLAPRPGGPLPSRLEGGSPARGSAFTSV |
| | | PQLGSAGSTSGGGGTGAGAAG |
| 82 | PCBP4 | GTPSSAPADLPAPFSPPLTALPTAPPGLLGTPYAISLSNFIGL |
| | | KPMPFLALPPASPGPPPGL |
| 83 | RNF222_0 | KSSQTLAVPVGLPSVPPLDSLGHTNPLAASSPAWRPPPGQ |
| | | ARPPGSPGQSAQLPLDLLPSLP |
| 84 | RNF222_1 | PPLDSLGHTNPLAASSPAWRPPPGQARPPGSPGQSAQLPLD |
| | | LLPSLPRESQIFVISRHGMPL |
| 85 | ARMCX5 | ARYIVLVPVEGGEQSLPPEGNWTLVETLIETPLGIRPLTKIP |
| | | PYHGPYYQTLAEIKKQIRQR |
| 86 | DNM1 | RPGSRGPAPGPPPAGSALGGAPPVPSRPGASPDPFGPPPQV |
| | | PSRPNRAPPGVPSRSGQASPS |
| 87 | ZNF541 | EACGDSPHAHESAGQPPPSSLRSLVPPEARSPGSLLPHRDL |
| | | LRRIVSSIVHQKTPSPGPAPA |
| 88 | FMN1_0 | PAPAALGKVFNNSASQSSTHKQTSPVPSPLSPRLPSPQQHH |
| | | RILRLPALPGEREAALNDSPC |
| 89 | FMN1_1 | LGKVFNNSASQSSTHKQTSPVPSPLSPRLPSPQQHHRILRLP |
| | | ALPGEREAALNDSPCRKSRV |
| 90 | FBXO41 | LFARKSVASSACSTPPPGPGPGPCPGPASASPASPSPADVA |
| | | YEEGLARLKIRALEKLEVDRR |
| 91 | GAS2L2 | TKASLSAKGTHMRKVPPQGGQDCSASTVSASPEAPTPSPL |
| | | DPNSDKAKACLSKGRRTLRKPK |
| 92 | UBAP1L | VSRPRALLHGLRGHRALSLCPSPAQSPRSASPPGPAPQHPA |
| | | APASPPRPSTAGAIPPLRSHK |
| 93 | IGSF9B_0 | PFHHGQYYGYLSSSSPGEVEPPPFYVPEVGSPLSSVMSSPP |
| | | LPTEGPFGHPTIPEENGENAS |
| 94 | IGSF9B_1 | NSTLPLTQTPTGGRSPEPWGRPEFPFGGLETPAMMFPHQLP |
| | | PCDVPESLQPKAGLPRGLPPT |
| 95 | ATF7-NPFF | GCGMVVGTASTMVTARPEQSQILIQHPDAPSPAQPQVSPA |
| | | QPTPSTGGRRRRTVDEDPDERR |
| 96 | HSFX2 | RNSRGQDHGLERVPFPPQLQSETYLHPADPSPAWDDPGST |
| | | GSPNLRLLTEEIAFQPLAEEAS |
| 97 | NPIPB6 | PPSVDDNLKECLFVPLPPSPLPPSVDDNLKTPPLATQEAEV |
| | | EKPPKPKRWRVDEVEQSPKPK |
| 98 | PCED1B | HSDVPSSAHAGFFVEDNFMVGPQLPMPFFPTPRYQRPAPV |
| | | VHRGFGRYRPRGPYTPWGQRPR |
| 99 | NPIPB9 | PPSVDDNLKECLFVPLPPSPLPPSVDDNLKTPPLATQEAEV |
| | | EKPPKPKRWRVDEVEQSPKPK |
| 100 | SLFNL1 | DLLLSEAQGPFSHREEKEEEEEDSGLSPGPSPGSGVPLPTW |
| | | PTHTLPDRPQAQQLQSCQGRP |
| 101 | NLGN4Y | HNLNEIFQYVSTTTKVPPPDMTSFPYGTRRSPAKIWPTTKR |
| | | PAITPANNPKHSKDPHKTGPE |
| 102 | PRRT4 | VALPLALLGLYPALCSPRVPPRCWAKLFRLSPGHAAPLLP |
| | | GGWVTGPPDKEPLGSAIARGDA |
| 103 | NUTM1 | PALPFLPPTSDPPDHPPREPPPQPIMPSVFSPDNPLMLSAFPS |
| | | SLLVTGDGGPCLSGAGAGK |
| 104 | LMTK3_0 | VSENGGLRFPRNTERPPETGPWRAPGPWEKTPESWGPAPT |
| | | IGEPAPETSLERAPAPSAVVSS |
| 105 | LMTK3_1 | PTNELSVQAPPEGDTDPSTPPAPPTPPHPATPGDGFPSNDS |
| | | GFGGSFEWAEDFPLLPPPGPP |
| 106 | ZCCHC14 | SSLNGGGGHGGKGAPGPGGALPTCPACHKITPRTEAPVSS |
| | | VSNSLENALHTSAHSTEESLPK |
| 107 | MIA2 | ELKFELLEKDPYALDVPNTAFGREHSPYGPSPLGWPSSETR |
| | | AFLSPPTLLEGPLRLSPLLPG |
| 108 | CTNND2 | AAAAAALYYSSSTLPAPPRGGSPLAAPQGGSPTKLQRGGS |
| | | APEGATYAAPRGSSPKQSPSRL |
| 109 | NRG3 | SRTPNRISTRLTTITRAPTRFPGHRVPIRASPRSTTARNTAA |
| | | PATVPSTTAPFFSSSTLGSR |
| 110 | KCNC2 | KTLPGTRLALLASSEPPGDCLTTAGDKLQPSPPPLSPPPRAP |
| | | PLSPGPGGCFEGGAGNCSSR |
| 111 | CD300E_0 | DAGSYWCKIQTVWVLDSWSRDPSDLVRVYVSPAITTPRR |
| | | TTHPATPPIFLVVNPGRNLSTGE |
| 112 | CD300E_1 | WCKIQTVWVLDSWSRDPSDLVRVYVSPAITTPRRTTHPAT |
| | | PPIFLVVNPGRNLSTGEVLTQN |
| 113 | COL9A1 | SVPFELQWMLIHCDPLRPRRETCHELPARITPSQTTDERGP |
| | | PGEQGPPGPPGPPGVPGIDGI |
| 114 | HTR3E | TIFITHLLHVATTQPPPLPRWLHSLLLHCNSPGRCCPTAPQ |
| | | KENKGPGLTPTHLPGVKEPEV |
| 115 | NPIPB15 | PPSVDDNLKDCLFVPLPPSPLPPSVDDNLKTPPLATQEAEA |
| | | EKPPKPKRWRVDEVEQSPKPK |
| 116 | SPEM3 | HLVRSSVPVPTSAPAPPGTLAPATTPVLAPTPAPVPASAPSP |
| | | APALVMALTTTPVPDPVPAT |
| 117 | KRTAP10-4 | QVDDCPESCCEPPCCAPSCCAPAPCLSLVCTPVSRVSSPCC |
| | | PVTCEPSPCQSGCTSSCTPSC |
| 118 | CRIP3 | GVNIGGVGSYLYNPPTPSPGCTTPLSPSSFSPPRPRTGLPQG |
| | | KKSPPHMKTFTGETSLCPGC |
| 119 | LRRC37A2 | PEHSHLTQATVQPLDLGFTITPESKTEVELSPTMKETPTQPP |
| | | KKVVPQLRVYQGVTNPTPGQ |
| 120 | KRTAP10-6 | CSDSWQVDDCPESCCEPPCCAPAPCLSLVCTPVSRVSSPCC |
| | | PVTCEPSPCQSGCTSSCTPSC |
| 121 | PNMA5 | GRSMTDVARALGCCSLPAESLDAEVMPQVRSPPLEPPKES |
| | | MWYRKLKVFSGTASPSPGEETF |
| 122 | ZNF683 | LLPYPGAFQASGQALPSQARNPGAGAAPTDSPGLERGGM |
| | | ASPAKRVPLSSQTGTAALPYPLK |
| 123 | PRR23A | CALAPNPSSEGHSPGPFFDPEFRLLEPVPSSPLQPLPPSPRV |
| | | GSPGPHAHPPLPKRPPCKAR |
| 124 | SELENOV_0 | PTPLRTPTPVRTRTPIRTLTPVLTPSPAGTSPLVLTPAPAQIP |
| | | TLVPTPALARIPRLVPPPA |
| 125 | SELENOV_1 | TPTPVRTRTPIRTLTPVLTPSPAGTSPLVLTPAPAQIPTLVPT |
| | | PALARIPRLVPPPAPAWIP |
| 126 | SELENOV_2 | ALARIPRLVPPPAPAWIPTPVPTPVPVRNPTPVPTPARTLTP |
| | | PVRVPAPAPAQLLAGIRAAL |
| 127 | STON1-GTF2A1L_0 | EFPSGSSSTSSTPLSSPIVDFYFSPGPPSNSPLSTPTKDFPGFP |
| | | GIPKAGTHVLYPIPESSS |
| 128 | STON1-GTF2A1L_1 | ISGGESSLLPTRPTCLSHALLPSDHSCTHPTPKVGLPDEVNP |
| | | QQAESLGFQSDDLPQFQYFR |
| 129 | POC1B-GALNT4 | AVVVVTGRRCRSGQTVPGAARSPLLPHPLPSPLRVPPPTG |
| | | ALGRPLPRWPQPRRTPFWSVIS |
| 130 | IKZF5 | PTSPEPRPSHSQRNYSPVAGPSSEPSAHTSTPSIGNSQPSTPA |
| | | PALPVQDPQLLHHCQHCDM |
| 131 | RHBDD3 | SCGYMPVHLAMLAGEGHRPRRPRGALPPWLSPWLLLALT |
| | | PLLSSEPPFLQLLCGLLAGLAYA |
| 132 | PRR23C | CALAPNPSSERRSPRPIFDLEFHLLEPVPSSPLQPLPPSPSPG |
| | | PHARPELPERPPCKVRRRL |
| 133 | PRR23B | CALAPNPSSERRSPRPIFDLEFRLLEPVPSSPLQPLPPSPCVG |
| | | SPGPHARSPLPERPPCKAR |
| 134 | STRC | GSNRRLVKRLCAGLLPPPTSCPEGLPPVPLTPDIFWGCFLE |
| | | NETLWAERLCGEASLQAVPPS |
| 135 | NKX1-1_0 | NPGADTSAPTGGGGGPGPGAGPGTGLPGGLSPLSPSPPMG |
| | | APLGMHGPAGYPAHGPGGLVCA |
| 136 | NKX1-1_1 | TSAPTGGGGGPGPGAGPGTGLPGGLSPLSPSPPMGAPLGM |
| | | HGPAGYPAHGPGGLVCAAQLPF |
| 137 | HCFC1R1 | ATHFSQLSLHNDHPYCSPPMTFSPALPPLRSPCSELLLWRY |
| | | PGSLIPEALRLLRLGDTPSPP |
| 138 | SPATA31A3 | SLSASQPPEPSLPLEHPSPEPPALFPHPPHTPDPLACSLPPPK |
| | | GFTAPPLRDSTLITPSHCD |
| 139 | OTUD4 | TCTDAHFPMQTEASVNGQMPQPEIGPPTFSSPLVIPPSQVS |
| | | ESHGQLSYQADLESETPGQLL |
| 140 | LRRC37A | PEHSHLTQATVQPLDLGFTITPESKTEVELSPTMKETPTQPP |
| | | KKVVPQLRVYQGVTNPTPGQ |
| 141 | FOXB2 | PEYGAFGVPVKSLCHSASQSLPAMPVPIKPTPALPPVSALQ |
| | | PGLTVPAASQQPPAPSTVCSA |
| 142 | KRTAP10-8 | SPSTCTGSSWQVDNCQESCCEPRSCASSCCTPSCCAPAPCL |
| | | ALVCAPVSCEPSPCQSGCTDS |
| 143 | KRTAP10-12 | CSDSWQVDDCPESCCEPPCCAPAPCLSLVCTPVSRVSSPCC |
| | | RVTCEPSPCQSGCTSSCTPSC |
| 144 | PLAGL2 | PPGATGGLVMGYSQAEAQPLLTTLQAQPQDSPGAGGPLN |
| | | FGPLHSLPPVFTSGLSSTTLPRF |
| 145 | CCDC187_0 | AGQACSPQRAWGAQRQGPSSQRPGSPPEKRSPFPQQPWS |
| | | AVATQPCPRRAWTACETWEDPGP |
| 146 | CCDC187_1 | DTVRDPAVGLLRSCPHSLPAAPTLATPTLATPACPGALGP |
| | | NWGRGAPGEWVSMQPQPLLPPT |
| 147 | SPATA31A7 | SLSASQPPEPSLPLEHPSPEPPALFPHPPHTPDPLACSLPPPK |
| | | GFTAPPLRDSTLITPSHCD |
| 148 | NOBOX | LEELEPQDYQQSNQPGPFQFSQAPQPPLFQSPQPKLPYLPT |
| | | FPFSMPSSLTLPPPEDSLFMF |
| 149 | TTN_0 | LSATSSAQKITKSVKAPTVKPSETRVRAEPTPLPQFPFADTP |
| | | DTYKSEAGVEVKKEVGVSIT |
| 150 | TTN_1 | PAAPLGAPTYIPTLEPVSRIRSLSPRSVSRSPIRMSPARMSPA |
| | | RMSPARMSPARMSPGRRLE |
| 151 | TTN_2 | GAPTYIPTLEPVSRIRSLSPRSVSRSPIRMSPARMSPARMSP |
| | | ARMSPARMSPGRRLEETDES |
| 152 | TTN_3 | IPTLEPVSRIRSLSPRSVSRSPIRMSPARMSPARMSPARMSP |
| | | ARMSPGRRLEETDESQLERL |
| 153 | TTN_4 | PVSRIRSLSPRSVSRSPIRMSPARMSPARMSPARMSPARMS |
| | | PGRRLEETDESQLERLYKPVF |
| 154 | TTN_5 | RSLSPRSVSRSPIRMSPARMSPARMSPARMSPARMSPGRR |
| | | LEETDESQLERLYKPVFVLKPV |
| 155 | TTN_6 | RSVSRSPIRMSPARMSPARMSPARMSPARMSPGRRLEETD |
| | | ESQLERLYKPVFVLKPVSFKCL |
| 156 | TTN_7 | PEVPPTKVPEVPKAAVPEKKVPEAIPPKPESPPPEVPEAPKE |
| | | VVPEKKVPAAPPKKPEVTPV |
| 157 | TTN_8 | PEVPPTKVPEVPKVAVPEKKVPEAIPPKPESPPPEVFEEPEE |
| | | VALEEPPAEVVEEPEPAAPP |
| 158 | TTN_9 | IELMRPVSELIRSRPQPAEEYEDDTERRSPTPERTRPRSPSP |
| | | VSSERSLSRFERSARFDIFS |
| 159 | TTN_10 | EKAVTSPPRVKSPEPRVKSPEAVKSPKRVKSPEPSHPKAVS |
| | | PTETKPTPTEKVQHLPVSAPP |
| 160 | TTN_11 | KSPEPRVKSPEAVKSPKRVKSPEPSHPKAVSPTETKPTPTE |
| | | KVQHLPVSAPPKITQFLKAEA |
| 161 | KIF26B | ESDKEDNGSEGQLTNREGPELPASKMQRSHSPVPAAAPAH |
| | | SPSPASPRSVPGSSSQHSASPL |
| 162 | COL16A1 | NSGEKGDQGFQGQPGFPGPPGPPGFPGKVGSPGPPGPQAE |
| | | KGSEGIRGPSGLPGSPGPPGPP |
| 163 | ESAM_0 | DTISKNGTLSSVTSARALRPPHGPPRPGALTPTPSLSSQALP |
| | | SPRLPTTDGAHPQPISPIPG |
| 164 | ESAM_1 | TSARALRPPHGPPRPGALTPTPSLSSQALPSPRLPTTDGAHP |
| | | QPISPIPGGVSSSGLSRMGA |
| 165 | DUSP8_0 | QLLEYERSLKLLAALQGDPGTPSGTPEPPPSPAAGAPLPRL |
| | | PPPTSESAATGNAAAREGGLS |
| 166 | DUSP8_1 | DIKSAYAPSRRPDGPGPPDPGEAPKLCKLDSPSGAALGLSS |
| | | PSPDSPDAAPEARPRPRRRPR |
| 167 | DUSP8_2 | RPDGPGPPDPGEAPKLCKLDSPSGAALGLSSPSPDSPDAAP |
| | | EARPRPRRRPRPPAGSPARSP |
| 168 | DUSP8_3 | GPPDPGEAPKLCKLDSPSGAALGLSSPSPDSPDAAPEARPR |
| | | PRRRPRPPAGSPARSPAHSLG |
| 169 | DUSP8_4 | PRHGLSALSAPGLPGPGQPAGPGAWAPPLDSPGTPSPDGP |
| | | WCFSPEGAQGAGGVLFAPFGRA |
| 170 | DUSP8_5 | SALSAPGLPGPGQPAGPGAWAPPLDSPGTPSPDGPWCFSP |
| | | EGAQGAGGVLFAPFGRAGAPGP |
| 171 | SULT1A2 | KCHRAPIFMRVPFLEFKVPGIPSGMETLKNTPAPRLLKTHL |
| | | PLALLPQTLLDQKVKVVYVAR |
| 172 | GPR150 | TVLGVACGHLLSVWWRHRPQAPAAAAPWSASPGRAPAP |
| | | SALPRAKVQSLKMSLLLALLFVGC |
| 173 | DRAP1 | SEDTDTDGEEETSQPPPQASHPSAHFQSPPTPFLPFASTLPL |
| | | PPAPPGPSAPDEEDEEDYDS |
| 174 | IQCE | FRGHLTRTKLLASKAHGSEPPSVPGLPDQSSPVPRVPSPIA |
| | | QATGSPVQEEAIVIIQSALRA |
| 175 | SOX13 | INLLQQQIQQVNMPYVMIPAFPPSHQPLPVTPDSQLALPIQ |
| | | PIPCKPVEYPLQLLHSPPAPV |
| 176 | CEP170B_0 | QDFMAQCLRESSPAARPSPEKVPPVLPAPLTPHGTSPVGPP |
| | | TPPPAPTDPQLTKARKQEEDD |
| 177 | CEP170B_1 | QCLRESSPAARPSPEKVPPVLPAPLTPHGTSPVGPPTPPPAP |
| | | TDPQLTKARKQEEDDSLSDA |
| 178 | MAGEC2 | STSSSLILGGPEEEEVPSGVIPNLTESIPSSPPQGPPQGPSQSP |
| | | LSSCCSSFSWSSFSEESS |
| 179 | COL22A1 | GLPGLKGDRGEKGEAGPAGPPGLPGTTSLFTPHPRMPGEQ |
| | | GPKGEKGDPGLPGEPGLQGRPG |
| 180 | EFCAB6 | EKEGMSYLDFAAGFEDPPMRGPETTPPQPPTPSKSYVNSH |
| | | FITAEECLKLFPRRLKESFRDP |
| 181 | BEND4 | PNPSSASEYGHLADVDPLSTSPVHTLGGWTSPATSESHGH |
| | | PSSSTLPEEEEEEDEEGYCPRC |
| 182 | ATRIP | LKVLVKLAENTSCDFLPRFQCVFQVLPKCLSPETPLPSVLL |
| | | AVELLSLLADHDQLAPQLCSH |
| 183 | NCAN | NRVEAHGEATATAPPSPAAETKVYSLPLSLTPTGQGGEAM |
| | | PTTPESPRADFRETGETSPAQV |
| 184 | SYNE4 | TLGQDSLGPPEHFQGGPRGNEPAAHPPRWSTPSSYEDPAG |
| | | GKHCEHPISGLEVLEAEQNSLH |
| 185 | ATAT1_0 | DIKPYSSSDREFLKVAVEPPWPLNRAPRRATPPAHPPPRSS |
| | | SLGNSPERGPLRPFVPEQELL |
| 186 | ATAT1_1 | AVEPPWPLNRAPRRATPPAHPPPRSSSLGNSPERGPLRPFV |
| | | PEQELLRSLRLCPPHPTARLL |
| 187 | TESK1 | KIKLLDTPSKPVLPLVPPSPFPSTQLPLVTTPETLVQPGTPA |
| | | RRCRSLPSSPELPRRMETAL |
| 188 | MYBPHL | AAGSKLKVKEASPADAEPPQASPGQGAGSPTPQLLPPIEEH |
| | | PKIWLPRALRQTYIRKVGDTV |
| 189 | DENND2C | SEDNIYEDIIYPTKENPYEDIPVQPLPMWRSPSAWKLPPAK |
| | | SAFKAPKLPPKPQFLHRKTME |
| 190 | PTPN4_0 | DHMVHTSPSEVFVNQRSPSSTQANSIVLESSPSQETPGDGK |
| | | PPALPPKQSKKNSWNQIHYSH |
| 191 | PTPN4_1 | TSPSEVFVNQRSPSSTQANSIVLESSPSQETPGDGKPPALPP |
| | | KQSKKNSWNQIHYSHSQQDL |
| 192 | MYCL | HYFYDYDCGEDFYRSTAPSEDIWKKFELVPSPPTSPPWGL |
| | | GPGAGDPAPGIGPPEPWPGGCT |
| 193 | FAM110A_0 | PCRRPQLDLDILSSLIDLCDSPVSPAEASRTPGRAEGAGRPP |
| | | PATPPRPPPSTSAVRRVDVR |
| 194 | FAM110A_1 | GAGRPPPATPPRPPPSTSAVRRVDVRPLPASPARPCPSPGP |
| | | AAASSPARPPGLQRSKSDLSE |
| 195 | SSC5D_0 | VCAGQRVANSRDDSTSPLDGAPWPGLLLELSPSTEEPLVT |
| | | HAPRPAGNPQNASRKKSPRPKQ |
| 196 | SSC5D_1 | TAGKLGPTLGAGTTRSPGSPPTLRVHGDTGSPRKPWPERR |
| | | PPRPAATRTAPPTPSPGPSASP |
| 197 | SSC5D_2 | NPDLILTSPDFALSTPDSSVVPALTPEPSPTPLPTLPKELTSD |
| | | PSTPSEVTSLSPTSEQVPE |
| 198 | SSC5D_3 | PALESSPSRSSTATSMDPLSTEDFKPPRSQSPNLTPPPTHTP |
| | | HSASDLTVSPDPLLSPTAHP |
| 199 | SSC5D_4 | STATSMDPLSTEDFKPPRSQSPNLTPPPTHTPHSASDLTVSP |
| | | DPLLSPTAHPLDHPPLDPLT |
| 200 | SSC5D_5 | TEDFKPPRSQSPNLTPPPTHTPHSASDLTVSPDPLLSPTAHP |
| | | LDHPPLDPLTLGPTPGQSPG |
| 201 | SSC5D_6 | SDLTVSPDPLLSPTAHPLDHPPLDPLTLGPTPGQSPGPHGPC |
| | | VAPTPPVRVMACEPPALVEL |
| 202 | PTPRN_0 | GGVVNVGADIKKTMEGPVEGRDTAELPARTSPMPGHPTA |
| | | SPTSSEVQQVPSPVSSEPPKAAR |
| 203 | PTPRN_1 | RDTAELPARTSPMPGHPTASPTSSEVQQVPSPVSSEPPKAA |
| | | RPPVTPVLLEKKSPLGQSQPT |
| 204 | SOX30_0 | PTTVYPYRSPTYSVVIPSLQNPITHPVGETSPAIQLPTPAVQ |
| | | SPSPVTLFQPSVSSAAQVAV |
| 205 | SOX30_1 | HARFATSTIQPPREYSSVSPCPRSAPIPQASPIPHPHVYQPPP |
| | | LGHPATLFGTPPRFSFHHP |
| 206 | CSPG4 | AGRVTYGATARASEAVEDTFRFRVTAPPYFSPLYTFPIHIG |
| | | GDPDAPVLTNVLLVVPEGGEG |
| 207 | RP1L1 | SPQVSLGDGQSEEASESSSPVPEDRPTPPPSPGGDTPHQRP |
| | | GSQTGPSSSRASSWGNCWQKD |
| 208 | C3orf22 | DSNTVQLPLQKRLVPTRSIPVRGLGAPDFTSPSGSCPAPLP |
| | | APSPPPLCNLWELKLLSRRFP |
| 209 | COL19A1_0 | GIGIPGRTGAQGPAGEPGIQGPRGLPGLPGTPGTPGNDGVP |
| | | GRDGKPGLPGPPGDPIALPLL |
| 210 | COL19A1_1 | SQGERGKPGLTGMKGAIGPMGPPGNKGSMGSPGHQGPPG |
| | | SPGIPGIPADAVSFEEIKKYINQ |
| 211 | KCNH5 | QLLSCRMTALEKQVAEILKILSEKSVPQASSPKSQMPLQVP |
| | | PQIPCQDIFSVSRPESPESDK |
| 212 | FAM110D | QVIARRQEPALRGSPGPLTPHPCNELGPPASPRTPRPVRRG |
| | | SGRRLPRPDSLIFYRQKRDCK |
| 213 | RUSC1 | HELAQKRKRGPGLPLVPQAKKDRSDWLIVFSPDTELPPSG |
| | | SPGGSSAPPREVTTFKELRSRS |
| 214 | PCARE_0 | RKASPTRTHWVPQADKRRRSLPSSYRPAQPSPSAVQTPPSP |
| | | PVSPRVLSPPTTKRRTSPPHQ |
| 215 | PCARE_1 | ADKRRRSLPSSYRPAQPSPSAVQTPPSPPVSPRVLSPPTTKR |
| | | RTSPPHQPKLPNPPPESAPA |
| 216 | PCARE_2 | KVSGNTHSIFCPATSSLFEAKPPLSTAHPLTPPSLPPEAGGP |
| | | LGNPAECWKNSSGPWLRADS |
| 217 | RASSF7 | AALGCEPRKTLTPEPAPSLSRPGPAAPVTPTPGCCTDLRGL |
| | | ELRVQRNAEELGHEAFWEQEL |
| 218 | MAN2B1 | ALGFSTYSVAQVPRWKPQARAPQPIPRRSWSPALTIENEHI |
| | | RATFDPDTGLLMEIMNMNQQL |
| 219 | EPX | RRPLLGASNQALARWLPAEYEDGLSLPFGWTPSRRRNGFL |
| | | LPLVRAVSNQIVRFPNERLTSD |
| 220 | NCCRP1_0 | EVREGHALGGGMEADGPASLQELPPSPRSPSPPPSPPPLPSP |
| | | PSLPSPAAPEAPELPEPAQP |
| 221 | NCCRP1_1 | GMEADGPASLQELPPSPRSPSPPPSPPPLPSPPSLPSPAAPEA |
| | | PELPEPAQPSEAHARQLLL |
| 222 | NCCRP1_2 | PASLQELPPSPRSPSPPPSPPPLPSPPSLPSPAAPEAPELPEPA |
| | | QPSEAHARQLLLEEWGPL |
| 223 | EMILIN2 | RGLPRGVDGQTGSGTVPGAEGFAGAPGYPKSPPVASPGAP |
| | | VPSLVSFSAGLTQKPFPSDGGV |
| 224 | LMOD1 | GNTDTKKDDEKVKKNEPLHEKEAKDDSKTKTPEKQTPSG |
| | | PTKPSEGPAKVEEEAAPSIFDEP |
| 225 | MYBPC2 | GKDAPKGAPKEAPPKEAPAEAPKEAPPEDQSPTAEEPTGV |
| | | FLKKPDSVSVETGKDAVVVAKV |
| 226 | MAGI2_0 | TSAPSSEKQSPMAQQSPLAQQSPLAQPSPATPNSPIAQPAPP |
| | | QPLQLQGHENSYRSEVKARQ |
| 227 | MAGI2_1 | DEPAPWSSPAAAAPGLPEVGVSLDDGLAPFSPSHPAPPSDP |
| | | SHQISPGPTWDIKREHDVRKP |
| 228 | MAGI2_2 | LPEVGVSLDDGLAPFSPSHPAPPSDPSHQISPGPTWDIKREH |
| | | DVRKPKELSACGQKKQRLGE |
| 229 | RTN2 | LDLRLRLAQPSSPEVLTPQLSPGSGTPQAGTPSPSRSRDSNS |
| | | GPEEPLLEEEEKQWGPLERE |
| 230 | TP53BP2 | QGKPGSPEPETEPVSSVQENHENERIPRPLSPTKLLPFLSNP |
| | | YRNQSDADLEALRKKLSNAP |
| 231 | HCN1_0 | PPVYTATSLSHSNLHSPSPSTQTPQPSAILSPCSYTTAVCSPP |
| | | VQSPLAARTFHYASPTASQ |
| 232 | HCN1_1 | PTASQLSLMQQQPQQQVQQSQPPQTQPQQPSPQPQTPGSS |
| | | TPKNEVHKSTQALHNTNLTREV |
| 233 | HCN1_2 | LSLMQQQPQQQVQQSQPPQTQPQQPSPQPQTPGSSTPKNE |
| | | VHKSTQALHNTNLTREVRPLSA |
| 234 | HCN1_3 | QQPQQQVQQSQPPQTQPQQPSPQPQTPGSSTPKNEVHKST |
| | | QALHNTNLTREVRPLSASQPSL |
| 235 | TRIM10 | NERPARELLTDIRSTLIRCETRKCRKPVAVSPELGQRIRDFP |
| | | QQALPLQREMKMFLEKLCFE |
| 236 | KCNH4 | VSQLSRELRHIMGLLQARLGPPGHPAGSAWTPDPPCPQLR |
| | | PPCLSPCASRPPPSLQDTTLAE |
| 237 | MEGF9 | APTTLSTTTGPAPTTPVATTVPAPTTPRTPTPDLPSSSNSSV |
| | | LPTPPATEAPSSPPPEYVCN |
| 238 | COL24A1 | LPGIRGGPGRTGLAGAPGPPGVKGSSGLPGSPGIQGPKGEQ |
| | | GLPGQPGIQGKRGHRGAQGDQ |
| 239 | PLA2G3 | GTVPLARLQPRTFYNASWSSRATSPTPSSRSPAPPKPRQKQ |
| | | HLRKGPPHQKGSKRPSKANTT |
| 240 | FRS3 | DETPLQKPTSTRAAIRSHGSFPVPLTRRRGSPRVFNFDFRRP |
| | | GPEPPRQLNYIQVELKGWGG |
| 241 | NYNRIN | PSLSEEILRCLSLHDPPDGALDIDLLPGAASPYLGIPWDGK |
| | | APCQQVLAHLAQLTIPSNFTA |
| 242 | MBD6_0 | NAPSYNWGAALRSSLVPSDLGSPPAPHASSSPPSDPPLFHC |
| | | SDALTPPPLPPSNNLPAHPGP |
| 243 | MBD6_1 | VPSDLGSPPAPHASSSPPSDPPLFHCSDALTPPPLPPSNNLP |
| | | AHPGPASQPPVSSATMHLPL |
| 244 | MBD6_2 | ASHSSSLRPSQRRPRRPPTVFRLLEGRGPQTPRRSRPRAPAP |
| | | VPQPFSLPEPSQPILPSVLS |
| 245 | MBD6_3 | PSLPGTTSGSLSSVPGAPAPPAASKAPVVPSPVLQSPSEGLG |
| | | MGAGPACPLPPLAGGEAFPF |
| 246 | MBD6_4 | TTSGSLSSVPGAPAPPAASKAPVVPSPVLQSPSEGLGMGA |
| | | GPACPLPPLAGGEAFPFPSPEQ |
| 247 | MBD6_5 | APCLPPESPASALEPEPARPPLSALAPPHGSPDPPVPELLTG |
| | | RGSGKRGRRGGGGLRGINGE |
| 248 | PRR35_0 | LYNHMKYSLCKDSLSLLLDSPDWACRRGSTTPRPHAPTPD |
| | | RPGESDPGRQPQGARPTGAAPA |
| 249 | PRR35_1 | AAAHVPFLASASPLLPPATAFPAVQPPQRPTPAPRLYYPLL |
| | | LEHTLGLPAGKAALAKAPVSP |
| 250 | PRR35_2 | SLTRFCSRSSLPTGSSVMLWPEDGDPGGPETPGPEGPLPLQ |
| | | PRGPVPGSPEHVGEDLTRALG |
| 251 | CACNA1D | LMQQQIMAVAGLDSSKAQKYSPSHSTRSWATPPATPPYR |
| | | DWTPCYTPLIQVEQSEALDQVNG |
| 252 | ORAI3 | FSTALGTFLFLAEVVLVGWVKFVPIGAPLDTPTPMVPTSR |
| | | VPGTLAPVATSLSPASNLPRSS |
| 253 | FOXE3 | GPPLPFPYAPYAPAPGPALLVPPPSAGPGPSPPARLFSVDSL |
| | | VNLQPELAGLGAPEPPCCAA |
| 254 | POM121C_0 | SSPAAPAASSASPMFKPIFTAPPKSEKEGLTPPGPSVSATAP |
| | | SSSSLPTTTSTTAPTFQPVF |
| 255 | POM121C_1 | AADFSGFGSTLATSAPATSSQPTLTFSNTSTPTFNIPFGSSA |
| | | KSPLPSYPGANPQPAFGAAE |
| 256 | MMP24 | LQGIQKIYGPPAEPLEPTRPLPTLPVRRIHSPSERKHERQPR |
| | | PPRPPLGDRPSTPGTKPNIC |
| 257 | GPR162 | PPRGPGFFREEITTFIDETPLPSPTASPGHSPRRPRPLGLSPR |
| | | RLSLGSPESRAVGLPLGLS |
| 258 | ZMIZ1_0 | GNPMANANNPMNPGGNPMASGMTTSNPGLNSPQFAGQQ |
| | | QQFSAKAGPAQPYIQQSMYGRPNY |
| 259 | ZMIZ1_1 | YSNYSQGNVNRPPRPVPVANYPHSPVPGNPTPPMTPGSSIP |
| | | PYLSPSQDVKPPFPPDIKPNM |
| 260 | ADAMTSL5 | FQARVQALGWPLRQPQPRGVEPQPPAAPAVTPAQTPTLAP |
| | | DPCPPCPDTRGRAHRLLHYCGS |
| 261 | PPP2R3A | AVLIQQTPEVIKIQNKPEKKPGTPLPPPATSPSSPRPLSPVPH |
| | | VNNVVNAPLSINIPRFYFP |
| 262 | PCDH8 | SPEEAARGAGPRPNMFDVLTFPGTGKAPFGSPAADAPPPA |
| | | VAAAEVPGSEGGSATGESACHF |
| 263 | MMP25 | LYGKAPQTPYDKPTRKPLAPPPQPPASPTHSPSFPIPDRCEG |
| | | NFDAIANIRGETFFFKGPWF |
| 264 | COL5A3_0 | GRKKNKEIWTSSPPPDSAENQTSTDIPKTETPAPNLPPTPTP |
| | | LVVTSTVTTGLNATILERSL |
| 265 | COL5A3_1 | SSPPPDSAENQTSTDIPKTETPAPNLPPTPTPLVVTSTVTTG |
| | | LNATILERSLDPDSGTELGT |
| 266 | COL5A3_2 | FPGPKGGPGDPGPTGLKGDKGPPGPVGANGSPGERGPLGP |
| | | AGGIGLPGQSGSEGPVGPAGKK |
| 267 | COL5A3_3 | DPGPPGPIGSLGHPGPPGVAGPLGQKGSKGSPGSMGPRGD |
| | | TGPAGPPGPPGAPAELHGLRRR |
| 268 | SOX7 | PLHCSHPLGSLALGQSPGVSMMSPVPGCPPSPAYYSPATY |
| | | HPLHSNLQAHLGQLSPPPEHPG |
| 269 | SEZ6L | IVASEEASEVPLWLDRKESAVPTTPAPLQISPFTSQPYVAH |
| | | TLPQRPEPGEPGPDMAQEAPQ |
| 270 | VGF | GSQQGPEEEAAEALLTETVRSQTHSLPAPESPEPAAPPRPQ |
| | | TPENGPEASDPSEELEALASL |
| 271 | PRR30 | LSPHQGLPPSQPPFSSTQSRRPSSPPPASPSPGFQFGSCDSNS |
| | | DFAPHPYSPSLPSSPTFFH |
| 272 | SOBP | ASTTVSPSDTANCSVTKIPTPVPKSIPISETPNIPPVSVQPPAS |
| | | IGPPLGVPPRSPPMVMTN |
| 273 | INO80B_0 | LKLKIKLGGQVLGTKSVPTFTVIPEGPRSPSPLMVVDNEEE |
| | | PMEGVPLEQYRAWLDEDSNLS |
| 274 | INO80B_1 | PMVRYCSGAQGSTLSFPPGVPAPTAVSQRPSPSGPPPRCSV |
| | | PGCPHPRRYACSRTGQALCSL |
| 275 | POU5F1_0 | YAQREDFEAAGSPFSGGPVSFPLAPGPHFGTPGYGSPHFTA |
| | | LYSSVPFPEGEAFPPVSVTTL |
| 276 | POU5F1_1 | DFEAAGSPFSGGPVSFPLAPGPHFGTPGYGSPHFTALYSSV |
| | | PFPEGEAFPPVSVTTLGSPMH |
| 277 | ERICH6 | FPDVRPRLASIVSPSLTSTFVPSQSATSTETPSASPPSSTSSH |
| | | KSFPKIFQTFRKDMSEMSI |
| 278 | B4GALNT1 | LACASLGLLYASTRDAPGLRLPLAPWAPPQSPRRPELPDL |
| | | APEPRYAHIPVRIKEQVVGLLA |
| 279 | ABRA | ANENSIRQAQEPTGWLPGGTQDSPQAPKPITPPTSHQKAQS |
| | | APKSPPRLPEGHGDGQSSEKA |
| 280 | PLCH2 | TGSKGVADDVVPPGPGPAPEAPAQEGPGSGSPRDTRPLST |
| | | QRPLPPLCSLETIAEEPAPGPG |
| 281 | STAC2_0 | LKCPTEVLLTPPTPLPPPSPPPTASDRGLATPSPSPCPVPRPL |
| | | AALKPVRLHSFQEHVFKRA |
| 282 | STAC2_1 | IRSSEEGPGDSASPVFTAPAESEGPGPEEKSPGQQLPKATLR |
| | | KDVGPMYSYVALYKFLPQEN |
| 283 | MAPK8IP2 | EEEEEEEGDGEGQEGGDPGSEAPAPGPLIPSPSVEEPHKHR |
| | | PTTLRLTTLGAQDSLNNNGGF |
| 284 | PARM1 | TNHSSTVTSTQPTGAPTAPESPTEESSSDHTPTSHATAEPVP |
| | | QEKTPPTTVSGKVMCELIDM |
| 285 | MMP28 | QSLYGKPLGGSVAVQLPGKLFTDFETWDSYSPQGRRPETQ |
| | | GPKYCHSSFDAITVDRQQQLYI |
| 286 | SPEF2 | EGKGKKGETALKRKGSPKGKSSGGKVPVKKSPADSTDTS |
| | | PVAIVPQPPKPGSEEWVYVNEPV |
| 287 | CMYA5 | EGKKPSPEVKIPTQRKPISSIHAREPQSPESPEVTQNPPTQPK |
| | | VAKPDLPEEKGKKGISSFK |
| 288 | VPS37C_0 | PVRPVPQGTPPVVEEQPQPPLAMPPYPLPYSPSPSLPVGPT |
| | | AHGALPPAPFPVVSQPSFYSG |
| 289 | VPS37C_1 | RPVPQGTPPVVEEQPQPPLAMPPYPLPYSPSPSLPVGPTAH |
| | | GALPPAPFPVVSQPSFYSGPL |
| 290 | TMEM200B | LRQGVLRAQALRPPDGPGWDCALLPSPGPRSPRAVGCAEP |
| | | EIWDPSPRRGTSPVPSVRSLRS |
| 291 | PAPPA | PCSPSGHWSPREAEGHPDVEQPCKSSVRTWSPNSAVNPHT |
| | | VPPACPEPQGCYLELEFLYPLV |
| 292 | HIVEP3_0 | GKGPGQDRPPLGPTVPYTEALQVFHHPVAQTPLHEKPYLP |
| | | PPVSLFSFQHLVQHEPGQSPEF |
| 293 | HIVEP3_1 | SLFSFQHLVQHEPGQSPEFFSTQAMSSLLSSPYSMPPLPPSL |
| | | FQAPPLPLQPTVLHPGQLHL |
| 294 | HIVEP3_2 | DYPKERERTGGGPGRPPDWTPHGTGAPAEPTPTHSPCTPP |
| | | DTLPRPPQGRRAAQSWSPRLES |
| 295 | SEC31B_0 | TLHSKETSSYRLGSQPSHQVPTPSPRPRVFTPQSSPAMPLA |
| | | PSHPSPYQGPRTQNISDYRAP |
| 296 | SEC31B_1 | PSHQVPTPSPRPRVFTPQSSPAMPLAPSHPSPYQGPRTQNIS |
| | | DYRAPGPQAIQPLPLSPGVR |
| 297 | NYAP1 | PQQPHALPPHAHRRPASALPSRRDGTPTKTTPCEIPPPFPNL |
| | | LQHRPPLLAFPQAKSASRTP |
| 298 | CAMTA2_0 | AGGRRGNCFFIQDDDSGEELKGHGAAPPIPSPPPSPPPSPAP |
| | | LEPSSRVGRGEALFGGPVGA |
| 299 | CAMTA2_1 | VAHSRGHVRLARCLEELQRQEPSVEPPFALSPPSSSPDTGL |
| | | SSVSSPSELSDGTFSVTSAYS |
| 300 | CAMTA2_2 | GHVRLARCLEELQRQEPSVEPPFALSPPSSSPDTGLSSVSSP |
| | | SELSDGTFSVTSAYSSAPDG |
| 301 | SYNPO2L_0 | AYYGETDSDADGPATQEKPRRPRRRGPTRPTPPGAPPDEV |
| | | YLSDSPAEPAPTIPGPPSQGDS |
| 302 | SYNPO2L_1 | TQEKPRRPRRRGPTRPTPPGAPPDEVYLSDSPAEPAPTIPGP |
| | | PSQGDSRVSSPSWEDGAALQ |
| 303 | SYNPO2L_2 | GEGLQSPPRAQSAPPEAAVLPPSPLPAPVASPRPFQPGGGA |
| | | PTPAPSIFNRSARPFTPGLQG |
| 304 | SYNPO2L_3 | ACNFMQPVGARSYKTLPHVTPKTPPPMAPKTPPPMTPKTP |
| | | PPVAPKPPSRGLLDGLVNGAAS |
| 305 | SYNPO2L_4 | QPVGARSYKTLPHVTPKTPPPMAPKTPPPMTPKTPPPVAP |
| | | KPPSRGLLDGLVNGAASSAGIP |
| 306 | SYNPO2L_5 | FAKRQSRADRYVVEGTPGPGLGPRPRSPSPTPSLPPSWKYS |
| | | PNIRAPPPIAYNPLLSPFFPQ |
| 307 | MUC5B_0 | CCEYVPCGPSPAPGTSPQPSLSASTEPAVPTPTQTTATEKTT |
| | | LWVTPSIRSTAALTSQTGSS |
| 308 | MUC5B_1 | TPGTAHTTKVPTTTTTGFTATPSSSPGTALTPPVWISTTTTP |
| | | TTTTPTTSGSTVTPSSIPGT |
| 309 | MUC5B_2 | ASCKDMAKTWLVPDSRKDGCWAPTGTPPTASPAAPVSST |
| | | PTPTPCPPQPLCDLMLSQVFAEC |
| 310 | MUC5B_3 | LVPDSRKDGCWAPTGTPPTASPAAPVSSTPTPTPCPPQPLC |
| | | DLMLSQVFAECHNLVPPGPFF |
| 311 | SCML4 | KIPKKRGRKPGYKIKSRVLMTPLALSPPRSTPEPDLSSIPQD |
| | | AATVPSLAAPQALTVCLYIN |
| 312 | RIN3 | PPVLPLQPCSPAQPPVLPALAPAPACPLPTSPPVPAPHVTPH |
| | | APGPPDHPNQPPMMTCERLP |
| 313 | RBBP8NL | QRISNQLHGTIAVVRPGSQACPADRGPANGTPPPLPARSSP |
| | | PSPAYERGLSLDSFLRASRPS |
| 314 | ADGRG2_0 | VPKATSFAEPPDYSPVTHNVPSPIGEIQPLSPQPSAPIASSPA |
| | | IDMPPQSETISSPMPQTHV |
| 315 | ADGRG2_1 | PDYSPVTHNVPSPIGEIQPLSPQPSAPIASSPAIDMPPQSETIS |
| | | SPMPQTHVSGTPPPVKAS |
| 316 | ADGRG2_2 | SAPIASSPAIDMPPQSETISSPMPQTHVSGTPPPVKASFSSPT |
| | | VSAPANVNTTSAPPVQTDI |
| 317 | ADGRG2_3 | DMPPQSETISSPMPQTHVSGTPPPVKASFSSPTVSAPANVN |
| | | TTSAPPVQTDIVNTSSISDLE |
| 318 | C9orf131 | SSLSTPLPEPHIDLELVWRNVQQREVPQGPSPLAVDPLHPV |
| | | PQPPTLAEAVKIERTHPGLPK |
| 319 | SLC30A6 | VAANVLNFSDHHVIPMPLLKGTDDLNPVTSTPAKPSSPPPE |
| | | FSFNTPGKNVNPVILLNTQTR |
| 320 | HEYL | FFHSCPGLPALSNQLAILGRVPSPVLPGVSSPAYPIPALRTA |
| | | PLRRATGIILPARRNVLPSR |
| 321 | SPPL2B | WTGSGFAKVLPPSPWAPAPADGPQPPKDSATPLSPQPPSEE |
| | | PATSPWPAEQSPKSRTSEEMG |
| 322 | CACNB1 | EAERQALAQLEKAKTKPVAFAVRTNVGYNPSPGDEVPVQ |
| | | GVAITFEPKDFLHIKEKYNNDWW |
| 323 | PRR16 | YNIKNREVHLHSEPVHPPGKIPHQGPPLPPTPHLPPFPLENG |
| | | GMGISHSNSFPPIRPATVPP |
| 324 | TRABD2B | HTPAGQAIHSPAPQSPAPSPEGTSTSPAPVTPAAAVPEAPS |
| | | VTPTAPPEDEDPALSPHLLLP |
| 325 | PRR18 | SSWPSATLKRPPARRGPGLDRTQPPAPPGVSPQALPSRAR |
| | | APATCAPPRPAGSGHSPARTTY |
| 326 | UBALD1 | ATSSSAASSWPTAASPPGGPQHHQPQPPLWTPTPPSPASD |
| | | WPPLAPQQATSEPRAHPAMEAE |
| 327 | RTL3 | YDLLRKSSEAKEPQKLPEHMNPPAAWEAQKTPEFKEPQK |
| | | PPEPQDLLPWEPPAAWELQEAPA |
| 328 | RNF149_0 | EMPAPESPPGRDPAANLSLALPDDDGSDDSSPPSASPAESE |
| | | PQCDPSFKGDAGENTALLEAG |
| 329 | RNF149_1 | ESPPGRDPAANLSLALPDDDGSDDSSPPSASPAESEPQCDP |
| | | SFKGDAGENTALLEAGRSDSR |
| 330 | PTPRQ | GYGNASNWISTKTLPGPPDGPPENVHVVATSPFSISISWSE |
| | | PAVITGPTCYLIDVKSVDNDE |
| 331 | PLSCR3 | YPEPALHPGPGQAPVPAQVPAPAPGFALFPSPGPVALGSA |
| | | APFLPLPGVPSGLEFLVQIDQI |
| 332 | HAVCR1 | TTTSVPVTTTVSTFVPPMPLPRQNHEPVATSPSSPQPAETH |
| | | PTTLQGAIRREPTSSPLYSYT |
| 333 | DNAJC30 | RRKYDRGLLSDEDLRGPGVRPSRTPAPDPGSPRTPPPTSRT |
| | | HDGSRASPGANRTMFNFDAFY |
| 334 | LPO | RKPALGAANRALARWLPAEYEDGLSLPFGWTPGKTRNGF |
| | | PLPLAREVSNKIVGYLNEEGVLD |
| 335 | PYGO1 | SSNPYLGPGYPGFGGYSTFRMPPHVPPRMSSPYCGPYSLR |
| | | NQPHPFPQNPLGMGFNRPHAFN |
| 336 | ADGRG4 | NYATSLNTPVSYPPWTPSSATLPSLTSFVYSPHSTEAEISTP |
| | | KTSPPPTSQMVEFPVLGTRM |
| 337 | SYN3 | PGSSLFSSLSSAMKQAPQATSGLMEPPGPSTPIVQRPRILLV |
| | | IDDAHTDWSKYFHGKKVNGE |
| 338 | MAP3K13 | SGMQTKRPDLLRSEGIPTTEVAPTASPLSGSPKMSTSSSKS |
| | | RYRSKPRHRRGNSRGSHSDFA |
| 339 | SFTPA2 | PGSHGLPGRDGRDGVKGDPGPPGPMGPPGETPCPPGNNG |
| | | LPGAPGVPGERGEKGEAGERGPP |
| 340 | HECW1 | SSEKDGLSEVDTVAADPSALEEDREEPEGATPGTAHPGHS |
| | | GGHFPSLANGAAQDGDTHPSTG |
| 341 | CELF3 | ITPSSGTSTPPAIAATPVSAIPAALGVNGYSPVPTQPTGQPA |
| | | PDALYPNGVHPYPAQSPAAP |
| 342 | INAFM1 | AAVLLAVYYGLIWVPTRSPAAPAGPQPSAPSPPCAARPGV |
| | | PPVPAPAAASLSCLLGVPGGPR |
| 343 | CDX1 | KDDWAAAYGPGPAAPAASPASLAFGPPPDFSPVPAPPGPG |
| | | PGLLAQPLGGPGTPSSPGAQRP |
| 344 | TEX13D | SRSHSQGEGSERSQRMPLPGDSGCHNPLSESPQGTAPLGSS |
| | | GCHSQEEGTEGPQGMDPLGNR |
| 345 | NDST2 | FLQCWTRLRLQTLPPVPLAQKYFELFPQERSPLWQNPCDD |
| | | KRHKDIWSKEKTCDRLPKFLIV |
| 346 | SPATA31E1 | DPLGDVCKPVPAKAHQPHGKCMQDPSPASLSPPAPPAPLA |
| | | STLSPGPMTFSEPFGPHSTLSA |
| 347 | SPATC1 | LAPQVATSYTPSSTTHIAQGAPHPPSRMHNSPTQNLPVPHC |
| | | PPHNAHSPPRTSSSPASVNDS |
| 348 | SIGLEC12_0 | SARPAVGVGDTGMEDANAVRGSASQGPLIESPADDSPPH |
| | | HAPPALATPSPEEGEIQYASLSF |
| 349 | SIGLEC12_1 | VGVGDTGMEDANAVRGSASQGPLIESPADDSPPHHAPPAL |
| | | ATPSPEEGEIQYASLSFHKARP |
| 350 | SOWAHA | SVEESGLGLGLGPGRSPHLRRLSRAGPRLLSPDAEELPAAP |
| | | PPSAVPLEPSEHEWLVRTAGG |
| 351 | RAPGEF5 | VGSVKMQPPCESPALAAAAAVVAADGPLRRSPSAREPER |
| | | EQPPASLRPRLRDLPALLRSGLT |
| 352 | ADRB1 | RVFREAQKQVKKIDSCERRFLGGPARPPSPSPSPVPAPAPP |
| | | PGPPRPAAAAATAPLANGRAG |
| 353 | CNGB1 | ATGAASDPAPPGRPQEMGPKLQARETPSLPTPIPLQPKEEP |
| | | KEAPAPEPQPGSQAQTSSLPP |
| 354 | PROB1_0 | DRTVQRARSPPFECRIPSEVPSRAVRPRSPSPPRQTPNGAV |
| | | RGPRCPSPQNLSPWDRTTRRV |
| 355 | PROB1_1 | RARSPPFECRIPSEVPSRAVRPRSPSPPRQTPNGAVRGPRCP |
| | | SPQNLSPWDRTTRRVSSPLF |
| 356 | PROB1_2 | QAPLPREPLALAGRTAPAQPRAASAPPTDRSPQSPSQGAR |
| | | RQPGAAPLGKVLVDPESGRYYF |
| 357 | SPATA31D1 | LADLFSPSPLRDPLPPQPVSPLDSKFPIDHSPPQQLPFPLLPP |
| | | HHIERVESSLQPEASLSLN |
| 358 | ARHGEF18 | RSLSPILPGRHSPAPPPDPGFPAPSPPPADSPSEGFSLKAGGT |
| | | ALLPGPPAPSPLPATPLSA |
| 359 | ALPK1 | SLQEPNNDNLEPSQNQPQQQMPLTPFSPHNTPGIFLAPGAG |
| | | LLEGAPEGIQEVRNMGPRNTS |
| 360 | PRICKLE1 | EYAWVPPGLRPEQIQLYFACLPEEKVPYVNSPGEKHRIKQ |
| | | LLYQLPPHDNEVRYCQSLSEEE |
| 361 | B4GALNT3 | TASFPGRTSHIPVQQPEKRKQKPSPEPSQDSPHSDKWPPGH |
| | | PVKNLPQMRGPRPRPAGDSPR |
| 362 | KRTAP10-2 | QVDDCPESCCELPCGTPSCCAPAPCLTLVCTPVSCVSSPCC |
| | | QAACEPSACQSGCTSSCTPSC |
| 363 | PRDM12 | CQSAYSQLAGLRAHQKSARHRPPSTALQAHSPALPAPHA |
| | | HAPALAAAAAAAAAAAAHHLPAM |
| 364 | POU6F2_0 | ELRGEDKAATSDSELNEPLLAPVESNDSEDTPSKLFGARG |
| | | NPALSDPGTPDQHQASQTHPPF |
| 365 | POU6F2_1 | QQQQPPPSTNQHPQPAPQAPSQSQQQPLQPTPPQQPPPASQ |
| | | QPPAPTSQLQQAPQPQQHQPH |
| 366 | POU6F2_2 | QQHQPHSHSQNQNQPSPTQQSSSPPQKPSQSPGHGLPSPLT |
| | | PPNPLQLVNNPLASQAAAAAA |
| 367 | POU6F2_3 | NQNQPSPTQQSSSPPQKPSQSPGHGLPSPLTPPNPLQLVNN |
| | | PLASQAAAAAAAMSSIASSQA |
| 368 | LDB3_0 | KIKSASYNLSLTLQKSKRPIPISTTAPPVQTPLPVIPHQKDPA |
| | | LDTNGSLVAPSPSPEARAS |
| 369 | LDB3_1 | AAPAPKPRVVTTASIRPSVYQPVPASTYSPSPGANYSPTPY |
| | | TPSPAPAYTPSPAPAYTPSPV |
| 370 | LDB3_2 | VVTTASIRPSVYQPVPASTYSPSPGANYSPTPYTPSPAPAYT |
| | | PSPAPAYTPSPVPTYTPSPA |
| 371 | LDB3_3 | SIRPSVYQPVPASTYSPSPGANYSPTPYTPSPAPAYTPSPAP |
| | | AYTPSPVPTYTPSPAPAYTP |
| 372 | LDB3_4 | PVPASTYSPSPGANYSPTPYTPSPAPAYTPSPAPAYTPSPVP |
| | | TYTPSPAPAYTPSPAPNYNP |
| 373 | KIAA1549L | SDIPPLLPLPPSSSLAPDSPHSIISEPAEQSPKVLLVPQTAPA |
| | | DPSLGQNIANPLIPFSDEM |
| 374 | FXYD5 | MDIQVPTRAPDAVYTELQPTSPTPTWPADETPQPQTQTQQ |
| | | LEGTDGPLVTDPETHKSTKAAH |
| 375 | HGFAC | CTSEGSAHRKWCATTHNYDRDRAWGYCVEATPPPGGPA |
| | | ALDPCASGPCLNGGSCSNTQDPQS |
| 376 | KCNH6_0 | KPMPQGHASYILEAPASNDLALVPIASETTSPGPRLPQGFL |
| | | PPAQTPSYGDLDDCSPKHRNS |
| 377 | KCNH6_1 | ASNDLALVPIASETTSPGPRLPQGFLPPAQTPSYGDLDDCS |
| | | PKHRNSSPRMPHLAVATDKTL |
| 378 | KCNH6_2 | ASETTSPGPRLPQGFLPPAQTPSYGDLDDCSPKHRNSSPRM |
| | | PHLAVATDKTLAPSSEQEQPE |
| 379 | ADAM19_0 | GCGKKCNGHGVCNNNQNCHCLPGWAPPFCNTPGHGGSI |
| | | DSGPMPPESVGPVVAGVLVAILVL |
| 380 | ADAM19_1 | PFRVSQNSGTGHANPTFKLQTPQGKRKVINTPEILRKPSQP |
| | | PPRPPPDYLRGGSPPAPLPAH |
| 381 | ESYT3 | KKSPATIFLTVPGPHSPGPIKSPRPMKCPASPFAWPPKRLAP |
| | | SMSSLNSLASSCFDLADISL |
| 382 | SHANK1_0 | RSGRGRKGPLVKQTKVEGEPQKGGGLPPAPSPTSPASPQP |
| | | PPAVAAPSEKNSIPIPTIIIKA |
| 383 | SHANK1_1 | RGRKGPLVKQTKVEGEPQKGGGLPPAPSPTSPASPQPPPA |
| | | VAAPSEKNSIPIPTIIIKAPST |
| 384 | SHANK1_2 | PTQPEPTGGGGGGGSSPSPAPAMSPVPPSPSPVPTPASPSGP |
| | | ATLDFTSQFGAALVGAARRE |
| 385 | SHANK1_3 | PVTSGRGPPSEDGPGVPPPSPRRSVPPSPTSPRASEENGLPL |
| | | LVLPPPAPSVDVEDGEFLFV |
| 386 | SHANK1_4 | PSVDVEDGEFLFVEPLPPPLEFSNSFEKPESPLTPGPPHPLPD |
| | | TPAPATPLPPVPPPAVAAA |
| 387 | SHANK1_5 | DVEDGEFLFVEPLPPPLEFSNSFEKPESPLTPGPPHPLPDTP |
| | | APATPLPPVPPPAVAAAPPT |
| 388 | SHANK1_6 | EPLPPPLEFSNSFEKPESPLTPGPPHPLPDTPAPATPLPPVPP |
| | | PAVAAAPPTLDSTASSLTS |
| 389 | SHANK1_7 | PLEFSNSFEKPESPLTPGPPHPLPDTPAPATPLPPVPPPAVA |
| | | AAPPTLDSTASSLTSYDSEV |
| 390 | EMID1 | VSELTERLKVLEAKMTMLTVIEQPVPPTPATPEDPAPLWG |
| | | PPPAQGSPGDGGLQDQVGAWGL |
| 391 | MYOZ3 | ELHIFPASPGASLGGPEGAHPAAAPAGCVPSPSALAPGYAE |
| | | PLKGVPPEKFNHTAISKGYRC |
| 392 | DAB1_0 | PTVAGQFPPAAFMPTQTVMPLPAAMFQGPLTPLATVPGTS |
| | | DSTRSSPQTDKPRQKMGKETFK |
| 393 | DAB1_1 | QTVMPLPAAMFQGPLTPLATVPGTSDSTRSSPQTDKPRQK |
| | | MGKETFKDFQMAQPPPVPSRKP |
| 394 | DAB1_2 | YFNKVGVAQDTDDCDDFDISQLNLTPVTSTTPSTNSPPTPA |
| | | PRQSSPSKSSASHASDPTTDD |
| 395 | DAB1_3 | GVAQDTDDCDDFDISQLNLTPVTSTTPSTNSPPTPAPRQSS |
| | | PSKSSASHASDPTTDDIFEEG |
| 396 | DAB1_4 | DFDISQLNLTPVTSTTPSTNSPPTPAPRQSSPSKSSASHASDP |
| | | TTDDIFEEGFESPSKSEEQ |
| 397 | VEGFB | SAVKPDRAATPHHRPQPRSVPGWDSAPGAPSPADITHPTP |
| | | APGPSAHAAPSTTSALTPGPAA |
| 398 | TOX2_0 | PSFPLSPTLHQQLSLPPHAQGALLSPPVSMSPAPQPPVLPTP |
| | | MALQVQLAMSPSPPGPQDFP |
| 399 | TOX2_1 | QQLSLPPHAQGALLSPPVSMSPAPQPPVLPTPMALQVQLA |
| | | MSPSPPGPQDFPHISEFPSSSG |
| 400 | MAP3K12 | GLLKPHPSRGLLHGNTMEKLIKKRNVPQKLSPHSKRPDIL |
| | | KTESLLPKLDAALSGVGLPGCP |
| 401 | NLGN1 | EILGPVIQFLGVPYAAPPTGERRFQPPEPPSPWSDIRNATQF |
| | | APVCPQNIIDGRLPEVMLPV |
| 402 | POM121_0 | SSPAAPAASSAPPMFKPIFTAPPKSEKEGPTPPGPSVTATAP |
| | | SSSSLPTTTSTTAPTFQPVF |
| 403 | POM121_1 | AADFSGFGSTLATSAPATSSQPTLTFSNTSTPTFNIPFGSSA |
| | | KSPLPSYPGANPQPAFGAAE |
| 404 | PCDH15_0 | LGPMFLPCVLVPNTRDCRPLTYQAAIPELRTPEELNPIIVTP |
| | | PIQAIDQDRNIQPPSDRPGI |
| 405 | PCDH15_1 | VPNTRDCRPLTYQAAIPELRTPEELNPIIVTPPIQAIDQDRNI |
| | | QPPSDRPGILYSILVGTPE |
| 406 | PCDH15_2 | PISPPSPPPAPAPLAPPPDISPFSLFCPPPSPPSIPLPLPPPT |
| | | FFPLSVSTSGPPTPPLLPP |
| 407 | COL4A6 | PCIIPGSYGPSGFPGTPGFPGPKGSRGLPGTPGQPGSSGSKG |
| | | EPGSPGLVHLPELPGFPGPR |
| 408 | MCIDAS_0 | SDSSSMMSPTLASGDFPFSPCDISPFGPCLSPPLDPRALQSP |
| | | PLRPPDVPPPEQYWKEVADQ |
| 409 | MCIDAS_1 | LASGDFPFSPCDISPFGPCLSPPLDPRALQSPPLRPPDVPPPE |
| | | QYWKEVADQNQRALGDALV |
| 410 | NEUROD1 | PPYGTMDSSHVFHVKPPPHAYSAALEPFFESPLTDCTSPSF |
| | | DGPLSPPLSINGNFSFKHEPS |
| 411 | SPATA31A5 | SLSASQPPEPSLPLEHPSPEPPALFPHPPHTPDPLACSLPPPK |
| | | GFTAPPLRDSTLITPSHCD |
| 412 | GCM2 | LSSCNYAPEDTGMSVYPEPWGPPVTVTRAASPSGPPPMKI |
| | | AGDCRAIRPTVAIPHEPVSSRT |
| 413 | TOGARAM2 | PSPLPPGQGVLTGLRAPRTRLARGSGPREKTPASLEPKPLA |
| | | SPIRDRPAAAKKPALPFSQSA |
| 414 | COL4A3_0 | GSKGERGRPGKDAMGTPGSPGCAGSPGLPGSPGPPGPPGD |
| | | IVFRKGPPGDHGLPGYLGSPGI |
| 415 | COL4A3_1 | GEPGLQGTQGVPGAPGPPGEAGPRGELSVSTPVPGPPGPP |
| | | GPPGHPGPQGPPGIPGSLGKCG |
| 416 | COL4A3_2 | PHGDLGFKGIKGLLGPPGIRGPPGLPGFPGSPGPMGIRGDQ |
| | | GRDGIPGPAGEKGETGLLRAP |
| 417 | COL4A3_3 | DKGSMGHPGPKGPPGTAGDMGPPGRLGAPGTPGLPGPRG |
| | | DPGFQGFPGVKGEKGNPGFLGSI |
| 418 | GRIN2C | GRRAPPPSPCPTPRSGPSPCLPTPDPPPEPSPTGWGPPDGGR |
| | | AALVRRAPQPPGRPPTPGPP |
| 419 | SOHLH1 | DPGTGASSGTRTPDVKAFLESPWSLDPASASPEPVPHILAS |
| | | SRQWDPASCTSLGTDKCEALL |
| 420 | ZNF469_0 | QPAAEELGFHRCFQEPPSSFTSTNYTSPSATPRPPAPGPPQS |
| | | RGTSPLQPGSYPEYQASGAD |
| 421 | ZNF469_1 | QGGSQGALGTAGKTPGPREKLPAVRSSQGGSPALFTYNG |
| | | MTDPGAQPLFFGVAQPQVSPHGT |
| 422 | ZNF469_2 | GDLAACAPSPTSAAHMPCSLGPLPREDPLTSPSRAQGGLG |
| | | GQLPASPSCRDPPGPQQLLACS |
| 423 | ZNF469_3 | PGPARSESVGSFGRAPSAPDKPPRTPRKQATPSRVLPTKPK |
| | | PNSQNKPRPPPSEQRKAEPGH |
| 424 | CCDC80 | VTRSTSRAVTVAARPMTTTAFPTTQRPWTPSPSHRPPTTTE |
| | | VITARRPSVSENLYPPSRKDQ |
| 425 | POU5F1B_0 | YAQREDFEAAGSPFSGGPVSFPPAPGPHFGTPGYGSPHFTA |
| | | LYSSVPFPEGEVFPPVSVITL |
| 426 | POU5F1B_1 | DFEAAGSPFSGGPVSFPPAPGPHFGTPGYGSPHFTALYSSV |
| | | PFPEGEVFPPVSVITLGSPMH |
| 427 | COL4A4 | GRKGESGIGAKGEKGIPGFPGPRGDPGSYGSPGFPGLKGEL |
| | | GLVGDPGLFGLIGPKGDPGNR |
| 428 | SULT1A4 | KCNRAPIYVRVPFLEVNDPGEPSGLETLKDTPPPRLIKSHLP |
| | | LALLPQTLLDQKVKVVYVAR |
| 429 | SULT1A3 | KCNRAPIYVRVPFLEVNDPGEPSGLETLKDTPPPRLIKSHLP |
| | | LALLPQTLLDQKVKVVYVAR |
| 430 | ADGRL1_0 | GPPDPSAGPATSPPLSTTTTARPTPLTSTASPAATTPLRRAP |
| | | LTTHPVGAINQLGPDLPPAT |
| 431 | ADGRL1_1 | SAGPATSPPLSTTTTARPTPLTSTASPAATTPLRRAPLTTHP |
| | | VGAINQLGPDLPPATAPVPS |
| 432 | COL1A2 | ASGPAGVRGPNGDAGRPGEPGLMGPRGLPGSPGNIGPAG |
| | | KEGPVGLPGIDGRPGPIGPAGAR |
| 433 | WIZ_0 | CLIKKEPPAGDLAPALAEDGPPTVAPGPVQSPLPLSPLAGR |
| | | PGKPGAGPAQVPRELSLTPIT |
| 434 | WIZ_1 | EPPAGDLAPALAEDGPPTVAPGPVQSPLPLSPLAGRPGKPG |
| | | AGPAQVPRELSLTPITGAKPS |
| 435 | CBLL2 | DHIQNNSDSGAKKPTPPDYYPECQSQPAVSSPHHIIPQKQH |
| | | YAPPPSPSSPVNHQMPYPPQD |
| 436 | ATXN7_0 | SAVGPTCPATVSSLVKPGLNCPSIPKPTLPSPGQILNGKGLP |
| | | APPTLEKKPEDNSNNRKFLN |
| 437 | ATXN7_1 | KPHTPSLPRPPGCPAQQGGSAPIDPPPVHESPHPPLPATEPA |
| | | SRLSSEEGEGDDKEESVEKL |
| 438 | FLRT2 | MAVRELNMNLLSCPTTTPGLPLFTPAPSTASPTTQPPTLSIP |
| | | NPSRSYTPPTPTTSKLPTIP |
| 439 | GRB10_0 | VRRLQEEDQQFRTSSLPAIPNPFPELCGPGSPPVLTPGSLPP |
| | | SQAAAKQDVKVFSEDGTSKV |
| 440 | GRB10_1 | EEDQQFRTSSLPAIPNPFPELCGPGSPPVLTPGSLPPSQAAA |
| | | KQDVKVFSEDGTSKVVEILA |
| 441 | TNFRSF10C_0 | CTSWDDIQCVEEFGANATVETPAAEETMNTSPGTPAPAAE |
| | | ETMNTSPGTPAPAAEETMTTSP |
| 442 | TNFRSF10C_1 | NATVETPAAEETMNTSPGTPAPAAEETMNTSPGTPAPAAE |
| | | ETMTTSPGTPAPAAEETMTTSP |
| 443 | TNFRSF10C_2 | SPGTPAPAAEETMNTSPGTPAPAAEETMTTSPGTPAPAAEE |
| | | TMTTSPGTPAPAAEETMITSP |
| 444 | TNFRSF10C_3 | SPGTPAPAAEETMTTSPGTPAPAAEETMTTSPGTPAPAAEE |
| | | TMITSPGTPASSHYLSCTIVG |
| 445 | PIK3C2B | SGKPVARSKTMPPQVPPRTYASRYGNRKNATPGKNRRISA |
| | | APVGSRPHTVANGHELFEVSEE |
| 446 | PRPF40B | AGKQQQQLPQTLQPQPPQPQPDPPPVPPGPTPVPTGLLEPE |
| | | PGGSEDCDVLEATQPLEQGFL |
| 447 | OLFML2B | SVLQPSPQVPATTVAHTATQQPAAPAPPAVSPREALMEA |
| | | MHTVPVPPTTVRTDSLGKDAPAG |
| 448 | GRIN2D | RYYGPIEPQGLGLGLGEARAAPRGAAGRPLSPPAAQPPQK |
| | | PPPSYFAIVRDKEPAEPPAGAF |
| 449 | GFY | LLAGLRSKAAPSAPLPLGCGFPDMAHPSETSPLKGASENS |
| | | KRDRLNPEFPGTPYPEPSKLPH |
| 450 | TBXT | NHRWKYVNGEWVPGGKPEPQAPSCVYIHPDSPNFGAHW |
| | | MKAPVSFSKVKLTNKLNGGGQIML |
| 451 | ARHGAP44 | GTACAGTQPGAQPGAQPGASPSPSQPPADQSPHTLRKVSK |
| | | KLAPIPPKVPFGQPGAMADQSA |
| 452 | ASCL2 | VRNALAGGLRPQAVRPSAPRGPPGTTPVAASPSRASSSPG |
| | | RGGSSEPGSPRSAYSSDDSGCE |
| 453 | DOK3 | AIARQRERLPELTRPQPCPLPRATSLPSLDTPGELREMPPGP |
| | | EPPTSRKMHLAEPGPQSLPL |
| 454 | DLX5 | VFDRRVPSIRSGDFQAPFQTSAAMHHPSQESPTLPESSATD |
| | | SDYYSPTGGAPHGYCSPTSAS |
| 455 | MAP3K14 | SLAHAGVALAKPLPRTPEQESCTIPVQEDESPLGAPYVRNT |
| | | PQFTKPLKEPGLGQLCFKQLG |
| 456 | PAX9 | LAQQGHYDSYKQHQPTPQPALPYNHIYSYPSPITAAAAKV |
| | | PTPPGVPAIPGSVAMPRTWPSS |
| 457 | ARHGEF15 | DSQTSPDSPSSTPTPSPVSRRSASPEPAPRSPVPPPKPSGSPC |
| | | TPLLPMAGVLAQNGSASAP |
| 458 | NEDD9 | TKPAGKDLHVKYNCDIPGAAEPVARRHQSLSPNHPPPQLG |
| | | QSVGSQNDAYDVPRGVQFLEPP |
| 459 | MUC7_0 | NTSSSVATLAPVNSPAPQDTTAAPPTPSATTPAPPSSSAPPE |
| | | TTAAPPTPSATTQAPPSSSA |
| 460 | MUC7_1 | ETTAAPPTPSATTQAPPSSSAPPETTAAPPTPPATTPAPPSSS |
| | | APPETTAAPPTPSATTPAP |
| 461 | MUC7_2 | PPTPSATTQAPPSSSAPPETTAAPPTPPATTPAPPSSSAPPET |
| | | TAAPPTPSATTPAPLSSSA |
| 462 | MUC7_3 | ETTAAPPTPPATTPAPPSSSAPPETTAAPPTPSATTPAPLSSS |
| | | APPETTAVPPTPSATTLDP |
| 463 | MUC7_4 | PPTPPATTPAPPSSSAPPETTAAPPTPSATTPAPLSSSAPPET |
| | | TAVPPTPSATTLDPSSASA |
| 464 | MUC7_5 | PPTPSATTLDPSSASAPPETTAAPPTPSATTPAPPSSPAPQET |
| | | TAAPITTPNSSPTTLAPDT |
| 465 | RCAN2 | KLYFAQVQTPETDGDKLHLAPPQPAKQFLISPPSSPPVGW |
| | | QPINDATPVLNYDLLYAVAKLG |
| 466 | MXRA8 | HLHHHYCGLHERRVFHLTVAEPHAEPPPRGSPGNGSSHSG |
| | | APGPDPTLARGHNVINVIVPES |
| 467 | STON1_0 | EFPSGSSSTSSTPLSSPIVDFYFSPGPPSNSPLSTPTKDFPGFP |
| | | GIPKAGTHVLYPIPESSS |
| 468 | STON1_1 | ISGGESSLLPTRPTCLSHALLPSDHSCTHPTPKVGLPDEVNP |
| | | QQAESLGFQSDDLPQFQYFR |
| 469 | MYBPC1 | MPEPTKKEENEVPAPAPPPEEPSKEKEAGTTPAKDWTLVE |
| | | TPPGEEQAKQNANSQLSILFIE |
| 470 | SIMC1_0 | DVPGLPQSILHPQDVAYLQDMPRSPGDVPQSPSDVSPSPD |
| | | APQSPGGMPHLPGDVLHSPGDM |
| 471 | SIMC1_1 | PQSILHPQDVAYLQDMPRSPGDVPQSPSDVSPSPDAPQSPG |
| | | GMPHLPGDVLHSPGDMPHSSG |
| 472 | SIMC1_2 | GDRPDFTQNDVQNRDMPMDISALSSPSCSPSPQSETPLEKV |
| | | PWLSVMETPARKEISLSEPAK |
| 473 | CHPF2 | FFPVHFQEFNPALSPQRSPPGPPGAGPDPPSPPGADPSRGAP |
| | | IGGRFDRQASAEGCFYNADY |
| 474 | SPATA22 | GCLPVPLFNQKKRNRQPLTSNPLKDDSGISTPSDNYDFPPL |
| | | PTDWAWEAVNPELAPVMKTVD |
| 475 | TOGARAM1 | QNPSPGAYILPSYPVSSPRTSPKHTSPLIISPKKSQDNSVNFS |
| | | NSWPLKSFEGLSKPSPQKK |
| 476 | ZCWPW1 | QNKEECGKGPKRIFAPPAQKSYSLLPCSPNSPKEETPGISSP |
| | | ETEARISLPKASLKKKEEKA |
| 477 | LTBR | TGGSMTITGNIYIYNGPVLGGPPGPGDLPATPEPPYPIPEEG |
| | | DPGPPGLSTPHQEDGKAWHL |
| 478 | TSPOAP1 | PPPCCCSIPQPCRGSGPKDLDLPPGSPGRCTPKSSEPAPATL |
| | | TGVPRRTAKKAESLSNSSHS |
| 479 | NLRP1 | TSGRRWREISASLLYQALPSSPDHESPSQESPNAPTSTAVL |
| | | GSWGSPPQPSLAPREQEAPGT |
| 480 | PLXND1_0 | VYLAAVNRLYQLSGANLSLEAEAAVGPVPDSPLCHAPQL |
| | | PQASCEHPRRLTDNYNKILQLDP |
| 481 | PLXND1_1 | LSAQWPCFWCSQQHSCVSNQSRCEASPNPTSPQDCPRTLL |
| | | SPLAPVPTGGSQNILVPLANTA |
| 482 | PLXND1_2 | SQQHSCVSNQSRCEASPNPTSPQDCPRTLLSPLAPVPTGGS |
| | | QNILVPLANTAFFQGAALECS |
| 483 | FLI1 | LSVVSDDQSLFDSAYGAAAHLPKADMTASGSPDYGQPHK |
| | | INPLPPQQEWINQPVRVNVKREY |
| 484 | COL7A1_0 | GPPGRGLTGPTGAVGLPGPPGPSGLVGPQGSPGLPGQVGE |
| | | TGKPGAPGRDGASGKDGDRGSP |
| 485 | COL7A1_1 | GEPGDPGEDGQKGAPGPKGFKGDPGVGVPGSPGPPGPPG |
| | | VKGDLGLPGLPGAPGVVGFPGQT |
| 486 | USP30 | LLGHKPSQHNPKLNKNPGPTLELQDGPGAPTPVLNQPGAP |
| | | KTQIFMNGACSPSLLPTLSAPM |
| 487 | NPAP1 | GLTSPSVQPLSGSIIPPGFAELTSPYTALGTPVNAEPVEGHN |
| | | ASAFPNGTAKTSGFRIATGM |
| 488 | RBMS3 | AASPVSTYQVQSTSWMPHPPYVMQPTGAVITPTMDHPMS |
| | | MQPANMMGPLTQQMNHLSLGTTG |
| 489 | ANKLE1_0 | VPRSQGTEAELNARLQALTLTPPNAAGFQSSPSSMPLLDRS |
| | | PAHSPPRTPTPGASDCHCLWE |
| 490 | ANKLE1_1 | LNARLQALTLTPPNAAGFQSSPSSMPLLDRSPAHSPPRTPT |
| | | PGASDCHCLWEHQTSIDSDMA |
| 491 | MEF2B | SGGRSLGEEGPPTRGASPPTPPVSIKSERLSPAPGGPGDFPK |
| | | TFPYPLLLARSLAEPLRPGP |
| 492 | VGLL2 | LAYYSKMQEAQECNASPSSSGSGSSSFSSQTPASIKEEEGS |
| | | PEKERPPEAEYINSRCVLFTY |
| 493 | ESRRB | RGSPKDERMSSHDGKCPFQSAAFTSRDQSNSPGIPNPRPSS |
| | | PTPLNERGRQISPSTRTPGGQ |
| 494 | GALNT6 | RDSMPKLQIRAPEAQQTLFSINQSCLPGFYTPAELKPFWER |
| | | PPQDPNAPGADGKAFQKSKWT |
| 495 | RBM38 | TYGLTPHYIYPPAIVQPSVVIPAAPVPSLSSPYIEYTPASPAY |
| | | AQYPPATYDQYPYAASPAT |
| 496 | COL18A1_0 | PGGRVKEGGLKGQKGEPGVPGPPGRAGPPGSPCLPGPPGL |
| | | PCPVSPLGPAGPALQTVPGPQG |
| 497 | COL18A1_1 | CPVSPLGPAGPALQTVPGPQGPPGPPGRDGTPGRDGEPGD |
| | | PGEDGKPGDTGPQGFPGTPGDV |
| 498 | COL18A1_2 | KGEPGDASLGFGMRGMPGPPGPPGPPGPPGTPVYDSNVFA |
| | | ESSRPGPPGLPGNQGPPGPKGA |
| 499 | ZMAT4 | DSHYQGKIHAKRLKLLLGEKTPLKTTATPLSPLKPPRMDT |
| | | APVVASPYQRRDSDRYCGLCAA |
| 500 | KRTAP16-1_0 | EPSCCSAVCTLPSSCQPVVCEPSCCQPVCPTPTCSVTSSCQ |
| | | AVCCDPSPCEPSCSESSICQP |
| 501 | KRTAP16-1_1 | EPPSVPSTCQEPSCCVSSICQPICSEPSPCSPAVCVSSPCQPT |
| | | CYVVKRCPSVCPEPVSCPS |
| 502 | KRTAP16-1_2 | QPTCYVVKRCPSVCPEPVSCPSTSCRPLSCSPGSSASAICRP |
| | | TCPRTFYIPSSSKRPCSATI |
| 503 | AJM1 | APGPRREDPLGRGRSYENLLGREVREPRGVSPEGRRPPVV |
| | | VNLSTSPRRYAALSLSETSLTE |
| 504 | C11orf91 | GLGPSSERPWPSPWPSGLASIPYEPLRFFYSPPPGPEVVASP |
| | | LVPCPSTPRLASASHPEELC |
| 505 | ADPGK | LLEPELPGSALRSLWSSLCLGPAPAPPGPVSPEGRLAAAW |
| | | DALIVRPVRRWRRVAVGVNACV |
| 506 | TGM1 | GDIGGNETVTLRQSFVPVRPGPRQLIASLDSPQLSQVHGVI |
| | | QVDVAPAPGDGGFFSDAGGDS |
| 507 | CACNA1C | LVHHQALAVAGLSPLLQRSHSPASFPRPFATPPATPGSRG |
| | | WPPQPVPTLRLEGVESSEKLNS |
| 508 | F12_0 | AAPPTPVSPRLHVPLMPAQPAPPKPQPTTRTPPQSQTPGAL |
| | | PAKREQPPSLTRNGPLSCGQR |
| 509 | F12_1 | VSPRLHVPLMPAQPAPPKPQPTTRTPPQSQTPGALPAKREQ |
| | | PPSLTRNGPLSCGQRLRKSLS |
| 510 | DOT1L | KNQTALDALHAQTVSQTAASSPQDAYRSPHSPFYQLPPSV |
| | | QRHSPNPLLVAPTPPALQKLLE |
| 511 | TCF7L1_0 | FAEVRRPQDSAFFKGPPYPGYPFLMIPDLSSPYLSNGPLSP |
| | | GGARTYLQMKWPLLDVPSSAT |
| 512 | TCF7L1_1 | HFSPGSPPTHLSPEIDPKTGIPRPPHPSELSPYYPLSPGAVGQ |
| | | IPHPLGWLVPQQGQPMYSL |
| 513 | CBARP_0 | PFLASPPPALGRYFSVDGGARGGPVGPCPPSPPPRRPRERS |
| | | PGPVDTRSPASSGKAPPRGGL |
| 514 | CBARP_1 | GRYFSVDGGARGGPVGPCPPSPPPRRPRERSPGPVDTRSPA |
| | | SSGKAPPRGGLTGATSPAWTR |
| 515 | SHF_0 | FEDPYSGGSSGSAALATPVAPGPTPPPRHGSPPHRLIRVETP |
| | | GPPAPPADERISGPPASSDR |
| 516 | SHF_1 | GSAALATPVAPGPTPPPRHGSPPHRLIRVETPGPPAPPADE |
| | | RISGPPASSDRLAILEDYADP |
| 517 | PTOV1 | RSGAGGPLGGRGRPPRPLVVRAVRSRSWPASPRGPQPPRI |
| | | RARSAPPMEGARVFGALGPIGP |
| 518 | HOXB13 | PAVNYAPLDLPGSAEPPKQCHPCPGVPQGTSPAPVPYGYF |
| | | GGGYYSCRVSRSSLKPCAQAAT |
| 519 | ELAVL4 | FRLDNLLNMAYGVKRLMSGPVPPSACPPRFSPITIDGMTSL |
| | | VGMNIPGHTGTGWCIFVYNLS |
| 520 | PNPLA1 | PAQPLASSTPLSLSGMPPVSFPAVHKPPSSTPGSSLPTPPPG |
| | | LSPLSPQQQVQPSGSPARSL |
| 521 | CHRD | VLCACEAPQWGRRTRGPGRVSCKNIKPECPTPACGQPRQL |
| | | PGHCCQTCPQERSSSERQPSGL |
| 522 | ALOX12 | AAPLVMLKMEPNGKLQPMVIQIQPPNPSSPTPTLFLPSDPP |
| | | LAWLLAKSWVRNSDFQLHEIQ |
| 523 | COL8A2 | GEPGLPGPPGEGRAGEPGTAGPTGPPGVPGSPGITGPPGPP |
| | | GPPGPPGAPGAFDETGIAGLH |
| 524 | NLGN4X | HNLNEIFQYVSTTTKVPPPDMTSFPYGTRRSPAKIWPTTKR |
| | | PAITPANNPKHSKDPHKTGPE |
| 525 | SMAD1 | RNLGQNEPHMPLNATFPDSFQQPNSHPFPHSPNSSYPNSPG |
| | | SSSSTYPHSPTSSDPGSPFQM |
| 526 | NID2_0 | QGNFLPLQCHGSTGFCWCVDPDGHEVPGTQTPPGSTPPHC |
| | | GPSPEPTQRPPTICERWRENLL |
| 527 | NID2_1 | PLQCHGSTGFCWCVDPDGHEVPGTQTPPGSTPPHCGPSPE |
| | | PTQRPPTICERWRENLLEHYGG |
| 528 | RNF38 | SISQDENYHHLPYAQQQAIEEPRAFHPPNVSPRLLHPAAHP |
| | | PQQNAVMVDIHDQLHQGTVPV |
| 529 | NOCT | HSPRRLCSALLQRDAPGLRRLPAPGLRRPLSPPAAVPRPAS |
| | | PRLLAAASAASGAARSCSRTV |
| 530 | ZNF746 | RPFTCTVCGKSFIRKDHLRKHQRNHAAGAKTPARGQPLPT |
| | | PPAPPDPFKSPASKGPLASTDL |
| 531 | SSH2_0 | KFPDLTVEDLETDALKADMNVHLLPMEELTSPLKDPPMSP |
| | | DPESPSPQPSCQTEISDFSTDR |
| 532 | SSH2_1 | KADMNVHLLPMEELTSPLKDPPMSPDPESPSPQPSCQTEIS |
| | | DFSTDRIDFFSALEKFVELSQ |
| 533 | ARHGAP39 | TFAPEADGTIFFPERRPSPFLKRAELPGSSSPLLAQPRKPSG |
| | | DSQPSSPRYGYEPPLYEEPP |
| 534 | WIPF1_0 | NRMPPPRPDVGSKPDSIPPPVPSTPRPIQSSPHNRGSPPVPG |
| | | GPRQPSPGPTPPPFPGNRGT |
| 535 | WIPF1_1 | PPPVPSTPRPIQSSPHNRGSPPVPGGPRQPSPGPTPPPFPGNR |
| | | GTALGGGSIRQSPLSSSSP |
| 536 | OBSCN_0 | GGSSSSSSSSDNELAPFARAKSLPPSPVTHSPLLHPRGFLRP |
| | | SASLPEEAEASERSTEAPAP |
| 537 | OBSCN_1 | NLSDLYDIKYLPFEFMIFRKVPKSAQPEPPSPMAEEELAEFP |
| | | EPTWPWPGELGPHAGLEITE |
| 538 | VWCE_0 | TATFPGEPGASPRLSPGPSTPPGAPTLPLASPGAPQPPPVTP |
| | | ERSFSASGAQIVSRWPPLPG |
| 539 | VWCE_1 | GTLLTEASALSMMDPSPSKTPITLLGPRVLSPTTSRLSTALA |
| | | ATTHPGPQQPPVGASRGEES |
| 540 | PFKFB2_0 | YGCKVETIKLNVEAVNTHRDKPTNNFPKNQTPVRMRRNS |
| | | FTPLSSSNTIRRPRNYSVGSRPL |
| 541 | PFKFB2_1 | NVEAVNTHRDKPTNNFPKNQTPVRMRRNSFTPLSSSNTIR |
| | | RPRNYSVGSRPLKPLSPLRAQD |
| 542 | NCOA6 | MILSRAQLMPQGQMMVNPPSQNLGPSPQRMTPPKQMLSQ |
| | | QGPQMMAPHNQMMGPQGQVLLQQ |
| 543 | CCDC120 | DNEEPHGCFSLAERPSPPKAWDQLRAVSGGSPERRTPWKP |
| | | PPSDLYGDLKSRRNSVASPTSP |
| 544 | ATXN7L2 | REVQGRAKDFDVLVAELKANSRKGESPKEKSPGRKEQVL |
| | | ERPSQELPSSVQVVAAVAAPSST |
| 545 | STIL | FARPQMNTRFPSSRMVPFHFPPSKCALWNPTPTGDFIYLHL |
| | | SYYRNPKLVVTEKTIRLAYRH |
| 546 | EIF4G3_0 | KQEVLPLTLELEILENPPEEMKLECIPAPITPSTVPSFPPTPPT |
| | | PPASPPHTPVIVPAAATT |
| 547 | EIF4G3_1 | LEILENPPEEMKLECIPAPITPSTVPSFPPTPPTPPASPPHTPV |
| | | IVPAAATTVSSPSAAITV |
| 548 | PRKCQ | RDTEQIFREGPVEIGLPCSIKNEARPPCLPTPGKREPQGISW |
| | | ESPLDEVDKMCHLPEPELNK |
| 549 | SCMH1 | KFPKKRGPKPGSKRKPRTLLNPPPASPTTSTPEPDTSTVPQ |
| | | DAATIPSSAMQAPTVCIYLNK |
| 550 | CABIN1 | CLVDEDSHSSAGTLPGPGASLPSSSGPGLTSPPYTATPIDHD |
| | | YVKCKKPHQQATPDDRSQDS |
| 551 | SMPD4_0 | TSDCAYFILVDRYLSWFLPTEGSVPPPLSSSPGGTSPSPPPR |
| | | TPAIPFASYGLHHTSLLKRH |
| 552 | SMPD4_1 | YFILVDRYLSWFLPTEGSVPPPLSSSPGGTSPSPPPRTPAIPF |
| | | ASYGLHHTSLLKRHISHQT |
| 553 | THAP7 | GPLGAQADEAGCSAQPSPERQPSPLEPRPVSPSAYMLRLPP |
| | | PAGAYIQNEHSYQVGSALLWK |
| 554 | EIF4G2 | QSFLMNKNQVPKLQPQITMIPPSAQPPRTQTPPLGQTPQLG |
| | | LKTNPPLIQEKPAKTSKKPPP |
| 555 | AKAP1 | GPDTAEPATAEAAVAPPDAGLPLPGLPAEGSPPPKTYVSC |
| | | LKSLLSSPTKDSKPNISAHHIS |
| 556 | ZNF684 | GCPITKTKVILKVEQGQEPWMVEGANPHESSPESDYPLVD |
| | | EPGKHRESKDNFLKSVLLTFNK |
| 557 | RGL2 | PSVSSLDSALESSPSLHSPADPSHLSPPASSPRPSRGHRRSA |
| | | SCGSPLSGGAEEASGGTGYG |
| 558 | MAP3K21 | TGATIISATGASALPLCPSPAPHSHLPREVSPKKHSTVHIVP |
| | | QRRPASLRSRSDLPQAYPQT |
| 559 | MN1_0 | GPQRPGNLPDFHSSGASSHAVPAPCLPLDQSPNRAASFHG |
| | | LPSSSGSDSHSLEPRRVTNQGA |
| 560 | MN1_1 | RCASWNGSMHNGALDNHLSPSAYPGLPGEFTPPVPDSFPS |
| | | GPPLQHPAPDHQSLQQQQQQQQ |
| 561 | FARP2_0 | PSAQPLGPPALQPGPGLSTKSPQPSPSSRKSPLSLSPAFQVP |
| | | LGPAEQGSSPLLSPVLSDAG |
| 562 | FARP2_1 | LGPPALQPGPGLSTKSPQPSPSSRKSPLSLSPAFQVPLGPAE |
| | | QGSSPLLSPVLSDAGGAGMD |
| 563 | ZNF787 | EDQQMASHENPVDILIMDDDDVPSWPPTKLSPPQSAPPAG |
| | | PPPRPRPPAPYICNECGKSFSH |
| 564 | ENKD1 | EPGPASGTESAHFLRAHSRCGPGLPPPHVSSPQPTPPGPEA |
| | | KEPGLGVDFIRHNARAAKRAP |
| 565 | DAXX | TANSIIVLDDDDEDEAAAQPGPSHPLPNAASPGAEAPSSSE |
| | | PHGARGSSSSGGKKCYKLENE |
| 566 | HIVEP1_0 | YNIAVTSSVGLTSPSSRSQVTPQNQQMDSASPLSISPANST |
| | | QSPPMPIYNSTHVASVVNQSV |
| 567 | HIVEP1_1 | TSSVGLTSPSSRSQVTPQNQQMDSASPLSISPANSTQSPPMP |
| | | IYNSTHVASVVNQSVEQMCN |
| 568 | HIVEP1_2 | EVSDLRSKSFDCGSITPPQTTPLTELQPPSSPSRVGVTGHVP |
| | | LLERRRGPLVRQISLNIAPD |
| 569 | SETBP1 | RQRGGESDFLPVSSAKPPAAPGCAGEPLLSTPGPGKGIPVG |
| | | GERMEPEEEDELGSGRDVDSN |
| 570 | SRRM2 | ATRPSPSPERSSTGPEPPAPTPLLAERHGGSPQPLATTPLSQ |
| | | EPVNPPSEASPTRDRSPPKS |
| 571 | MAPK7 | RSLLERWTRMARPAAPALTSVPAPAPAPTPTPTPVQPTSPP |
| | | PGPVAQPTGPQPQSAGSTSGP |
| 572 | ALX3 | LQNSLWASPGSGSPGGPCLVSPEGIPSPCMSPYSHPHGSVA |
| | | GFMGVPAPSAAHPGIYSIHGF |
| 573 | ATXN1L_0 | QLPSTSLQFIGSPYSLPYAVPPNFLPSPLLSPSANLATSHLPH |
| | | FVPYASLLAEGATPPPQAP |
| 574 | ATXN1L_1 | PSPLLSPSANLATSHLPHFVPYASLLAEGATPPPQAPSPAHS |
| | | FNKAPSATSPSGQLPHHSST |
| 575 | ATXN1L_2 | PYASLLAEGATPPPQAPSPAHSFNKAPSATSPSGQLPHHSS |
| | | TQPLDLAPGRMPIYYQMSRLP |
| 576 | ZZEF1_0 | IRPVDFKQRNKADKGVSLSKDPSCQTQISDSPADASPPTGL |
| | | PDAEDSEVSSQKPIEEKAVTP |
| 577 | ZZEF1_1 | FKQRNKADKGVSLSKDPSCQTQISDSPADASPPTGLPDAE |
| | | DSEVSSQKPIEEKAVTPSPEQV |
| 578 | ZNF318 | DLKVEELTALGNLGDMPVDFCTTRVSPAHRSPTVLCQKV |
| | | CEENSVSPIGCNSSDPADFEPIP |
| 579 | PDLIM4 | DPEIQDGSPTTSRRPSGTGTGPEDGRPSLGSPYGQPPRFPVP |
| | | HNGSSEATLPAQMSTLHVSP |
| 580 | CCDC9_0 | VAVTAPRKGRSVEKENVAVESEKNLGPSRRSPGTPRPPGA |
| | | SKGGRTPPQQGGRAGMGRASRS |
| 581 | CCDC9_1 | AAPRAYSDHDDRWETKEGAASPAPETPQPTSPETSPKETP |
| | | MQPPEIPAPAHRPPEDEGEENE |
| 582 | CNNM4_0 | VEAGKENMKFETGAFSYYGTMALTSVPSDRSPAHPTPLSR |
| | | SASLSYPDRTDVSTAATLAGSS |
| 583 | CNNM4_1 | ENMKFETGAFSYYGTMALTSVPSDRSPAHPTPLSRSASLS |
| | | YPDRTDVSTAATLAGSSNQFGS |
| 584 | CSF2RB | YVSSADLVFTPNSGASSVSLVPSLGLPSDQTPSLCPGLASG |
| | | PPGAPGPVKSGFEGYVELPPI |
| 585 | SPEG_0 | YMATATNELGQATCAASLTVRPGGSTSPFSSPITSDEEYLS |
| | | PPEEFPEPGETWPRTPTMKPS |
| 586 | SPEG_1 | QATCAASLTVRPGGSTSPFSSPITSDEEYLSPPEEFPEPGET |
| | | WPRTPTMKPSPSQNRRSSDT |
| 587 | SPEG_2 | ARRLQESPSLSALSEAQPSSPARPSAPKPSTPKSAEPSATTP |
| | | SDAPQPPAPQPAQDKAPEPR |
| 588 | SPEG_3 | SALSEAQPSSPARPSAPKPSTPKSAEPSATTPSDAPQPPAPQ |
| | | PAQDKAPEPRPEPVRASKPA |
| 589 | SPEG_4 | LSGHAQGPSQGPAAPPSEPKPHAAVFARVASPPPGAPEKR |
| | | VPSAGGPPVLAEKARVPTVPPR |
| 590 | ARHGAP30 | PALQHRPSPASGPGPGPGLGPGPPDEKLEASPASSPLADSG |
| | | PDDLAPALEDSLSQEVQDSFS |
| 591 | TTBK2 | KIKLGICKAATEEENSHGQANGLLNAPSLGSPIRVRSEITQP |
| | | DRDIPLVRKLRSIHSFELEK |
| 592 | POLR2A_0 | SAASDASGFSPGYSPAWSPTPGSPGSPGPSSPYIPSPGGAMS |
| | | PSYSPTSPAYEPRSPGGYTP |
| 593 | POLR2A_1 | ASGFSPGYSPAWSPTPGSPGSPGPSSPYIPSPGGAMSPSYSP |
| | | TSPAYEPRSPGGYTPQSPSY |
| 594 | POLR2A_2 | AWSPTPGSPGSPGPSSPYIPSPGGAMSPSYSPTSPAYEPRSP |
| | | GGYTPQSPSYSPTSPSYSPT |
| 595 | KLF10 | SAGGVPPMPVICQMVPLPANNPVVTTVVPSTPPSQPPAVC |
| | | PPVVFMGTQVPKGAVMFVVPQP |
| 596 | ALDOC_0 | VTEKVLAAVYKALSDHHVYLEGTLLKPNMVTPGHACPIK |
| | | YTPEEIAMATVTALRRTVPPAVP |
| 597 | ALDOC_1 | KALSDHHVYLEGTLLKPNMVTPGHACPIKYTPEEIAMATV |
| | | TALRRTVPPAVPGVTFLSGGQS |
| 598 | NEO1 | VKPPDLWIHHERLELKPIDKSPDPNPIMTDTPIPRNSQDITP |
| | | VDNSMDSNIHQRRNSYRGHE |
| 599 | DAB2_0 | PGAMMGGQPSGFSQPVIFGTSPAVSGWNQPSPFAASTPPP |
| | | VPVVWGPSASVAPNAWSTTSPL |
| 600 | DAB2_1 | SPLGNPFQSNIFPAPAVSTQPPSMHSSLLVTPPQPPPRAGPP |
| | | KDISSDAFTALDPLGDKEIK |
| 601 | GPATCH8 | KNSVTAKLLLEKIQSRKVERKPSVSEEVQATPNKAGPKLK |
| | | DPPQGYFGPKLPPSLGNKPVLP |
| 602 | TMEM131_0 | HHAHSPLEQHPQPPLPPPVPQPQEPQPERLSPAPLAHPSHPE |
| | | RASSARHSSEDSDITSLIEA |
| 603 | TMEM131_1 | LPFTTPANTLASIGLMGTENSPAPHAPSTSSPADDLGQTYN |
| | | PWRIWSPTIGRRSSDPWSNSH |
| 604 | DIP2A | NPWSISSCDAFLNVFQSRGLRPEVICPCASSPEALTVAIRRP |
| | | PDLGGPPPRKAVLSMNGLSY |
| 605 | MINK1_0 | ERTRMNKQQNSPLAKSKPGSTGPEPPIPQASPGPPGPLSQT |
| | | PPMQRPVEPQEGPHKSLVAHR |
| 606 | MINK1_1 | SPLAKSKPGSTGPEPPIPQASPGPPGPLSQTPPMQRPVEPQE |
| | | GPHKSLVAHRVPLKPYAAPV |
| 607 | IGSF9_0 | FSEIVLSAPEGLPTTPAAPGLPPTEIPPPLSPPRGLVAVRTPR |
| | | GVLLHWDPPELVPKRLDGY |
| 608 | IGSF9_1 | GLPTTPAAPGLPPTEIPPPLSPPRGLVAVRTPRGVLLHWDP |
| | | PELVPKRLDGYVLEGRQGSQG |
| 609 | IGSF9_2 | PDSVAKLKLQGSPVPSLRQSLLWGDPAGTPSPHPDPPSSRG |
| | | PLPLEPICRGPDGRFVMGPTV |
| 610 | IGSF9_3 | RTPAQRLARSFDCSSSSPSGAPQPLCIEDISPVAPPPAAPPSP |
| | | LPGPGPLLQYLSLPFFREM |
| 611 | MDC1 | PEAIAQGGQSKTLRSSTVRAMPVPTTPEFQSPVTTDQPISPE |
| | | PITQPSCIKRQRAAGNPGSL |
| 612 | NCAPH2 | GEVLASRKDFRMNTCVPHPRGAFMLEPEGMSPMEPAGVS |
| | | PMPGTQKDTGRTEEQPMEVSVCR |
| 613 | ANKIB1 | PENCCQRSGVQMPTPPPSGYNAWDTLPSPRTPRTTRSSVT |
| | | SPDEISLSPGDLDTSLCDICMC |
| 614 | UBN2_0 | KSNPTPKPTVSPSSSSPNALVAQGSHSSTNSPVHKQPSGMN |
| | | ISRQSPTLNLLPSSRTSGLPP |
| 615 | UBN2_1 | SPNALVAQGSHSSTNSPVHKQPSGMNISRQSPTLNLLPSSR |
| | | TSGLPPTKNLQAPSKLTNSSS |
| 616 | RASAL3 | EPDPEPEQEAPELEPEPELEPPTPQIPEAPTPNVPVWDIGGF |
| | | TLLDGKLVLLGGEEEGPRRP |
| 617 | TNRC6B_0 | KKKEATQKVTEQKTKVPEVTKPSLSQPTAASPIGSSPSPPV |
| | | NGGNNAKRVAVPNGQPPSAAR |
| 618 | TNRC6B_1 | TQKVTEQKTKVPEVTKPSLSQPTAASPIGSSPSPPVNGGNN |
| | | AKRVAVPNGQPPSAARYMPRE |
| 619 | TNRC6B_2 | GDPNSYNYKNVNLWDKNSQGGPAPREPNLPTPMTSKSAS |
| | | VWSKSTPPAPDNGTSAWGEPNES |
| 620 | CDAN1 | LQEEREMLRKERSKQLQQSPTPTCPTPELGSPLPSRTGSLT |
| | | DEPADPARVSSRQRLELVALV |
| 621 | KLF13 | VARILADLNQQAPAPAPAERREGAAARKARTPCRLPPPAP |
| | | EPTSPGAEGAAAAPPSPAWSEP |
| 622 | STK11IP | ELMSSFRERFGRNWLQYRSHLEPSGNPLPATPTTSAPSAPP |
| | | ASSQGPDTAPRPSPPQEEARG |
| 623 | SLC12A7_0 | VEAHADGGGDETAERTEAPGTPEGPEPERPSPGDGNPREN |
| | | SPFLNNVEVEQESFFEGKNMAL |
| 624 | SLC12A7_1 | ETAERTEAPGTPEGPEPERPSPGDGNPRENSPFLNNVEVEQ |
| | | ESFFEGKNMALFEEEMDSNPM |
| 625 | DENND5A | GSLERILVGELLTSQPEVDERPCRTPPLQQSPSVIRRLVTISP |
| | | NNKPKLNTGQIQESIGEAV |
| 626 | HIP1 | LQYFKRLIQIPQLPENPPNFLRASALSEHISPVVVIPAEASSP |
| | | DSEPVLEKDDLMDMDASQQ |
| 627 | RBM15B | YDRPLKVEPVYLRGGGGSSRRSSSSSAAASTPPPGPPAPAD |
| | | PLGYLPLHGGYQYKQRSLSPV |
| 628 | DENND4B_0 | LSGRGPKAGGRQDEAGTPRRGLGARLQQLLTPSRHSPASR |
| | | IPPPELPPDLPPPARRSPMDSL |
| 629 | DENND4B_1 | PKAGGRQDEAGTPRRGLGARLQQLLTPSRHSPASRIPPPEL |
| | | PPDLPPPARRSPMDSLLHPRE |
| 630 | DENND4B_2 | QQLLTPSRHSPASRIPPPELPPDLPPPARRSPMDSLLHPRER |
| | | PGSTASESSASLGSEWDLSE |
| 631 | MAP3K10_0 | FAEAEDGGSSVPPSPYSTPSYLSVPLPAEPSPGARAPWEPT |
| | | PSAPPARWGHGARRRCDLALL |
| 632 | MAP3K10_1 | VPPSPYSTPSYLSVPLPAEPSPGARAPWEPTPSAPPARWGH |
| | | GARRRCDLALLGCATLLGAVG |
| 633 | PAIP1_0 | AGPAERARHQPPQPKAPGFLQPPPLRQPRTTPPPGAQCEVP |
| | | ASPQRPSRPGALPEQTRPLRA |
| 634 | PAIP1_1 | QPKAPGFLQPPPLRQPRTTPPPGAQCEVPASPQRPSRPGAL |
| | | PEQTRPLRAPPSSQDKIPQQN |
| 635 | CASKIN2_0 | TESDTVKRRPKCREREPLQTALLAFGVASATPGPAAPLPSP |
| | | TPGESPPASSLPQPEPSSLPA |
| 636 | CASKIN2_1 | EPLQTALLAFGVASATPGPAAPLPSPTPGESPPASSLPQPEP |
| | | SSLPAQGVPTPLAPSPAMQP |
| 637 | CASKIN2_2 | PLPSPTPGESPPASSLPQPEPSSLPAQGVPTPLAPSPAMQPP |
| | | VPPCPGPGLESSAASRWNGE |
| 638 | CASKIN2_3 | TPGESPPASSLPQPEPSSLPAQGVPTPLAPSPAMQPPVPPCP |
| | | GPGLESSAASRWNGETEPPA |
| 639 | TFAP2E | RPDGLGAAAGGARLSSLPQAAYGPAPPLCHTPAATAAAE |
| | | FQPPYFPPPYPQPPLPYGQAPDA |
| 640 | CD5 | SRNDMCHSLGLTCLEPQKTTPPTTRPPPTTTPEPTAPPRLQ |
| | | LVAQSGGQHCAGVVEFYSGSL |
| 641 | DNAJB1 | DGRTIPVVFKDVIRPGMRRKVPGEGLPLPKTPEKRGDLIIE |
| | | FEVIFPERIPQTSRTVLEQVL |
| 642 | PALMD | DEEEEDEGEAEKPSYHPIAPHSQVYQPAKPTPLPRKRSEAS |
| | | PHENTNHKSPHKNSISLKEQE |
| 643 | RNF10 | ALGPTSTEGHGALSISPLSRSPGSHADFLLTPLSPTASQGSP |
| | | SFCVGSLEEDSPFPSFAQML |
| 644 | KMT2C_0 | PIQDSLSQAQTSQPPSPQVFSPGSSNSRPPSPMDPYAKMVG |
| | | TPRPPPVGHSFSRRNSAAPVE |
| 645 | KMT2C_1 | RETPSKAFHQYSNNISTLDVHCLPQLPEKASPPASPPIAFPP |
| | | AFEAAQVEAKPDELKVTVKL |
| 646 | SH2D3A | RTPSFELPDASERPPTYCELVPRVPSVQGTSPSQSCPEPEAP |
| | | WWEAEEDEEEENRCFTRPQA |
| 647 | PRPF6 | HTSVDPRQTQFGGLNTPYPGGLNTPYPGGMTPGLMTPGT |
| | | GELDMRKIGQARNTLMDMRLSQV |
| 648 | CDK13 | LQLRPPPEPSTPVSGQDDLIQHQDMRILELTPEPDRPRILPP |
| | | DQRPPEPPEPPPVTEEDLDY |
| 649 | ARHGAP17 | KPNSQGPPNPMALPSEHGLEQPSHTPPQTPTPPSTPPLGKQ |
| | | NPSLPAPQTLAGGNPETAQPH |
| 650 | HIVEP2_0 | SAQLFGSGKLASPSEVVQQVAEKQYPPHRPSPYSCQHSLS |
| | | FPQHSLPQGVMHSTKPHQSLEG |
| 651 | HIVEP2_1 | SESAELVACTQDKAPSPSETCDSEISEAPVSPEWAPPGDGA |
| | | ESGGKPSPSQQVQQQSYHTQP |
| 652 | MAP1S | PTSEAGLSLPLRGPRARRSASPHDVDLCLVSPCEFEHRKAV |
| | | PMAPAPASPGSSNDSSARSQE |
| 653 | ZBTB4_0 | SSSSSSSSSSSSSSSASSSSSSSSSSPPPASPPASSPPRVLELPG |
| | | VPAAAFSDVLNFIYSAR |
| 654 | ZBTB4_1 | SSSSSSSSSSASSSSSSSSSSPPPASPPASSPPRVLELPGVPAA |
| | | AFSDVLNFIYSARLALPG |
| 655 | ZBTB4_2 | NTLKLYRLLPMRAAKRPYKTYSQGAPEAPLSPTLNTPAPV |
| | | AMPASPPPGPPPAPEPGPPPSV |
| 656 | ZBTB4_3 | YRLLPMRAAKRPYKTYSQGAPEAPLSPTLNTPAPVAMPAS |
| | | PPPGPPPAPEPGPPPSVITFAH |
| 657 | NFATC3_0 | HLPQLQCRDESVSKEQHMIPSPIVHQPFQVTPTPPVGSSYQ |
| | | PMQTNVVYNGPTCLPINAASS |
| 658 | NFATC3_1 | PVADQITGQPSSQLQPITYGPSHSGSATTASPAASHPLASSP |
| | | LSGPPSPQLQPMPYQSPSSG |
| 659 | NFATC3_2 | SSQLQPITYGPSHSGSATTASPAASHPLASSPLSGPPSPQLQ |
| | | PMPYQSPSSGTASSPSPATR |
| 660 | ZBTB32 | WLRENPGGSEESLRKLPGPLPPAGSLQTSVTPRPSWAEAP |
| | | WLVGGQPALWSILLMPPRYGIP |
| 661 | DPH2 | VVLLSEPACAHALEALATLLRPRYLDLLVSSPAFPQPVGSL |
| | | SPEPMPLERFGRRFPLAPGRR |
| 662 | DMRTC2_0 | KGTTQPQVPSGKENIAPQPQTPHGAVLLAPTPPGKNSCGP |
| | | LLLSHPPEASPLSWTPVPPGPW |
| 663 | DMRTC2_1 | QTPHGAVLLAPTPPGKNSCGPLLLSHPPEASPLSWTPVPPG |
| | | PWVPGHWLPPGFSMPPPVVCR |
| 664 | DMRTC2_2 | AVLLAPTPPGKNSCGPLLLSHPPEASPLSWTPVPPGPWVPG |
| | | HWLPPGFSMPPPVVCRLLYQE |
| 665 | RBM25 | APSVSSASGNATPNTPGDESPCGIIIPHENSPDQQQPEEHRP |
| | | KIGLSLKLGASNSPGQPNSV |
| 666 | AATK | SGGDHPQAEPKLATEAEGTTGPRLPLPSVPSPSQEGAPLPS |
| | | EEASAPDAPDALPDSPTPATG |
| 667 | GATA5 | QGALLPREQFAAPLGRPVGTSYSATYPAYVSPDVAQSWT |
| | | AGPFDGSVLHGLPGRRPTFVSDF |
| 668 | CC2D1A | ASIRKGNAIDEADIPPPVAIGKGPASTPTYSPAPTQPAPRIAS |
| | | APEPRVTLEGPSATAPASS |
| 669 | NACAD | HGPRSALGGAREVPDAPPAACPEVSQARLLSPAREERGLS |
| | | GKSTPEPTLPSAVATEASLDSC |
| 670 | CUX2 | VSLNSPSAASSPGLMMSVSPVPSSSAPISPSPPGAPPAKVPS |
| | | ASPTADMAGALHPSAKVNPN |
| 671 | BSN_0 | LGASLLTQASTLMSVQPEADTQGQPAPSKGTPKIVENDAS |
| | | KEAGPKPLGSGPGPGPAPGAKT |
| 672 | BSN_1 | EPSKTPSSVQEKKTRVPTKAEPMPKPPPETTPTPATPKVKS |
| | | GVRRAEPATPVVKAVPEAPKG |
| 673 | BSN_2 | PSSVQEKKTRVPTKAEPMPKPPPETTPTPATPKVKSGVRR |
| | | AEPATPVVKAVPEAPKGGEAED |
| 674 | BSN_3 | SGGRVIPDVRVTQHFAKETQDPLKLHSSPASPSSASKEIGM |
| | | PFSQGPGTPATTAVAPCPAGL |
| 675 | BSN_4 | GPRATAEFSTQTPSPAPASDMPRSPGAPTPSPMVAQGTQTP |
| | | HRPSTPRLVWQESSQEAPFMV |
| 676 | BSN_5 | QTRMVHASASTSPLCSPTETQPTTHGYSQTTPPSVSQLPPE |
| | | PPGPPGFPRVPSAGADGPLAL |
| 677 | BSN_6 | GRGESLACQTEPDGQAQGVAGPQLVGPTAISPYLPGIQIVT |
| | | PGPLGRFEKKKPDPLEIGYQA |
| 678 | PPRC1_0 | GPLDLYPKLADTIQTNPIPTHLSLVDSAQASPMPVDSVEAD |
| | | PTAVGPVLAGPVPVDPGLVDL |
| 679 | PPRC1_1 | ISDNLPPVDAVPSGPAPVDLALVDPVPNDLTPVDPVLVKS |
| | | RPTDPRRGAVSSALGGSAPQLL |
| 680 | PPRC1_2 | PSLPETPTGLADIPCLVIPPAPAKKTALQRSPETPLEICLVPV |
| | | GPSPASPSPEPPVSKPVAS |
| 681 | PPRC1_3 | PETPTGLADIPCLVIPPAPAKKTALQRSPETPLEICLVPVGPS |
| | | PASPSPEPPVSKPVASSPT |
| 682 | PPRC1_4 | LVIPPAPAKKTALQRSPETPLEICLVPVGPSPASPSPEPPVSK |
| | | PVASSPTEQVPSQEMPLLA |
| 683 | PPRC1_5 | PPAPAKKTALQRSPETPLEICLVPVGPSPASPSPEPPVSKPV |
| | | ASSPTEQVPSQEMPLLARPS |
| 684 | PPRC1_6 | ETPLEICLVPVGPSPASPSPEPPVSKPVASSPTEQVPSQEMP |
| | | LLARPSPPVQSVSPAVPTPP |
| 685 | LMTK2 | DVMLTGDTLSTSLQSSPEVQVPPTSFETEETPRRVPPDSLPT |
| | | QGETQPTCLDVIVPEDCLHQ |
| 686 | ARNT2 | QLNQSQVAWTGSRPPFPGQQIPSQSSKTQSSPFGIGTSHTY |
| | | PADPSSYSPLSSPATSSPSGN |
| 687 | HHEX | YIEDILGRGPAAPTPAPTLPSPNSSFTSLVSPYRTPVYEPTPI |
| | | HPAFSHHSAAALAAAYGPG |
| 688 | TMEM201 | PHPSVGGSPASLFIPSPPSFLPLANQQLFRSPRRTSPSSLPGR |
| | | LSRALSLGTIPSLTRADSG |
| 689 | ALX4_0 | YGAGQQDLATPLESGAGARGSFNKFQPQPSTPQPQPPPQP |
| | | QPQQQQPQPQPPAQPHLYLQRG |
| 690 | ALX4_1 | IQNPSWLGNNGAASPVPACVVPCDPVPACMSPHAHPPGS |
| | | GASSVTDFLSVSGAGSHVGQTHM |
| 691 | MNT_0 | PLAPRQPALVGAPGLSIKEPAPLPSRPQVPTPAPLLPDSKAT |
| | | IPPNGSPKPLQPLPTPVLTI |
| 692 | MNT_1 | KEPAPLPSRPQVPTPAPLLPDSKATIPPNGSPKPLQPLPTPV |
| | | LTIAPHPGVQPQLAPQQPPP |
| 693 | MNT_2 | TTHASVIQTVNHVLQGPGGKHIAHIAPSAPSPAVQLAPATP |
| | | PIGHITVHPATLNHVAHLGSQ |
| 694 | NFATC4_0 | ASATPFGTDMDFSPPRPPYPSYPHEDPACETPYLSEGFGYG |
| | | MPPLYPQTGPPPSYRPGLRMF |
| 695 | NFATC4_1 | SDPYGGRGSSFSLGLPFSPPAPFRPPPLPASPPLEGPFPSQSD |
| | | VHPLPAEGYNKVGPGYGPG |
| 696 | TRIM33 | DNLLSRYISGSHLPPQPTSTMNPSPGPSALSPGSSGLSNSHT |
| | | PVRPPSTSSTGSRGSCGSSG |
| 697 | RBPMS | PNPSTPLPNTVPQFIAREPYELTVPALYPSSPEVWAPYPLYP |
| | | AELAPALPPPAFTYPASLHA |
| 698 | FCHSD1 | GVFPSLLVEELLGPPGPPELSDPEQMLPSPSPPSFSPPAPTSV |
| | | LDGPPAPVLPGDKALDFPG |
| 699 | SKOR1 | SAPSAGGGPDGEQPTGPPSATSSGADGPANSPDGGSPRPR |
| | | RRLGPPPAGRPAFGDLAAEDLV |
| 700 | SMG6 | QYPYTGYNPLQYPVGPTNGVYPGPYYPGYPTPSGQYVCSP |
| | | LPTSTMSPEEVEQHMRNLQQQE |
| 701 | EHBP1L1_0 | GKEAEGSLTEASLPEAQVASGAGAGAPRASSPEKAEEDRR |
| | | LPGSQAPPALVSSSQSLLEWCQ |
| 702 | EHBP1L1_1 | AAAAEGQAPDPSPAPGPPTAADSQQPPGGSSPSEEPPPSPG |
| | | EEAGLQRFQDTSQYVCAELQA |
| 703 | TAOK2 | QPKSLKVRAGQRPPGLPLPIPGALGPPNTGTPIEQQPCSPG |
| | | QEAVLDQRMLGEEEEAVGERR |
| 704 | ARHGEF5_0 | RKGTVSSQGTEVVFASASVTPPRTPDSAPPSPAEAYPITPAS |
| | | VSARPPVAFPRRETSCAARA |
| 705 | ARHGEF5_1 | GPLPQASDPAVARQHRPLPSTPDSSHHAQATPRWRYNKPL |
| | | PPTPDLPQPHLPPISAPGSSRI |
| 706 | RBM27 | LGTPPPLLAARLVPPRNLMGSSIGYHTSVSSPTPLVPDTYE |
| | | PDGYNPEAPSITSSGRSQYRQ |
| 707 | ANKRD34A_0 | GRGMLSPRAQEEEEKRDVFEFPLPKPPDDPSPSEPLPKPPR |
| | | HPPKPLKRLNSEPWGLVAPPQ |
| 708 | ANKRD34A_1 | PGLLERRGSGTLLLDHISQTRPGFLPPLNVSPHPPIPDIRPQP |
| | | GGRAPSLPAPPYAGAPGSP |
| 709 | ANKHD1 | PHFALLAAQTMQQIRHPRLPMAQFGGTFSPSPNTWGPFPV |
| | | RPVNPGNTNSSPKHNNTSRLPN |
| 710 | EPS8L2 | PVSRQSIRNSQKHSPTSEPTPPGDALPPVSSPHTHRGYQPTP |
| | | AMAKYVKILYDFTARNANEL |
| 711 | HOXD1 | PVALQPAFPLGNGDGAFVSCLPLAAARPSPSPPAAPARPSV |
| | | PPPAAPQYAQCTLEGAYEPGA |
| 712 | PPARGC1B | QSRSCTELHKHLTSAQCCLQDRGLQPPCLQSPRLPAKEDK |
| | | EPGEDCPSPQPAPASPRDSLAL |
| 713 | HUWE1_0 | PAPRGSGTASDDEFENLRIKGPNAVQLVKTTPLKPSPLPVI |
| | | PDTIKEVIYDMLNALAAYHAP |
| 714 | HUWE1_1 | SGTASDDEFENLRIKGPNAVQLVKTTPLKPSPLPVIPDTIKE |
| | | VIYDMLNALAAYHAPEEADK |
| 715 | PTPN3 | VSQNRSPHQESLSENNPAQSYLTQKSSSSVSPSSNAPGSCS |
| | | PDGVDQQLLDDFHRVTKGGST |
| 716 | SLC24A1 | VHHCVVVKPTPAMLTTPSPSLTTALLPEELSPSPSVLPPSLP |
| | | DLHPKGEYPPDLFSVEERRQ |
| 717 | DOCK2 | IISLASMNSDCSTPSKPTSESFDLELASPKTPRVEQEEPISPG |
| | | STLPEVKLRRSKKRTKRSS |
| 718 | SHARPIN | VRGATVEGQNGSKSNSPPALGPEACPVSLPSPPEASTLKGP |
| | | PPEADLPRSPGNLTEREELAG |
| 719 | KIF13B | TAVPAEEPPGPQQLVSPGRERPDLEAPAPGSPFRVRRVRAS |
| | | ELRSFSRMLAGDPGCSPGAEG |
| 720 | UNK | GSCPRGPFCAFAHVEQPPLSDDLQPSSAVSSPTQPGPVLYM |
| | | PSAAGDSVPVSPSSPHAPDLS |
| 721 | BRME1 | VETLGVPLQEATELGDPTQADSARPEQSSQSPVQAVPGSG |
| | | DSQPDDPPDRGTGLSASQRASQ |
| 722 | BICRA_0 | NSVFGGAGAASAPTGTPSGQPLAVAPGLGSSPLVPAPNVIL |
| | | HRTPTPIQPKPAGVLPPKLYQ |
| 723 | BICRA_1 | TPSGQPLAVAPGLGSSPLVPAPNVILHRTPTPIQPKPAGVLP |
| | | PKLYQLTPKPFAPAGATLTI |
| 724 | BICRA_2 | QPAPQAPPAVSTPLPLGLQQPQAQQPPQAPTPQAAAPPQA |
| | | TTPQPSPGLASSPEKIVLGQPP |
| 725 | BICRA_3 | LGLQQPQAQQPPQAPTPQAAAPPQATTPQPSPGLASSPEKI |
| | | VLGQPPSATPTAILTQDSLQM |
| 726 | BICRA_4 | PAPQIPAAAPLKGPGPSSSPSLPHQAPLGDSPHLPSPHPTRP |
| | | PSRPPSRPQSVSRPPSEPPL |
| 727 | BICRA_5 | PAAAPLKGPGPSSSPSLPHQAPLGDSPHLPSPHPTRPPSRPP |
| | | SRPQSVSRPPSEPPLHPCPP |
| 728 | MED13_0 | YTPQTHTSFGMPPSSAPPSNSGAGILPSPSTPRFPTPRTPRTP |
| | | RTPRGAGGPASAQGSVKYE |
| 729 | MED13_1 | HTSFGMPPSSAPPSNSGAGILPSPSTPRFPTPRTPRTPRTPRG |
| | | AGGPASAQGSVKYENSDLY |
| 730 | ACACB | ADVNLPAAQLQIAMGVPLHRLKDIRLLYGESPWGVTPISF |
| | | ETPSNPPLARGHVIAARITSEN |
| 731 | ERF_0 | AFRGPPLARLPHDPGVFRVYPRPRGGPEPLSPFPVSPLAGP |
| | | GSLLPPQLSPALPMTPTHLAY |
| 732 | ERF_1 | PLARLPHDPGVFRVYPRPRGGPEPLSPFPVSPLAGPGSLLPP |
| | | QLSPALPMTPTHLAYTPSPT |
| 733 | ERF_2 | YPRPRGGPEPLSPFPVSPLAGPGSLLPPQLSPALPMTPTHLA |
| | | YTPSPTLSPMYPSGGGGPSG |
| 734 | HIPK1 | QPLQIQSGVLTQGSCTPLMVATLHPQVATITPQYAVPFTLS |
| | | CAAGRPALVEQTAAVLQAWPG |
| 735 | PRR12 | GSSAPPPKAPAPPPKPETPEKTTSEKPPEQTPETAMPEPPAP |
| | | EKPSLLRPVEKEKEKEKVTR |
| 736 | INPP5D_0 | SFPKPAPRKDQESPKMPRKEPPPCPEPGILSPSIVLTKAQEA |
| | | DRGEGPGKQVPAPRLRSFTC |
| 737 | INPP5D_1 | QGKPKTPVSSQAPVPAKRPIKPSRSEINQQTPPTPTPRPPLP |
| | | VKSPAVLHLQHSKGRDYRDN |
| 738 | INPP5D_2 | TPVSSQAPVPAKRPIKPSRSEINQQTPPTPTPRPPLPVKSPA |
| | | VLHLQHSKGRDYRDNTELPH |
| 739 | SRRT | NFLTDAKRPALPEIKPAQPPGPAQILPPGLTPGLPYPHQTPQ |
| | | GLMPYGQPRPPILGYGAGAV |
| 740 | HERC1 | TLLGVVKEGSTSAKVQWDEAEITISFPTFWSPSDTPLYNLE |
| | | PCEPLPFDVARFRGLTASVLL |
| 741 | ARAP3_0 | PQAQPPKPVPKPRTVFGGLSGPATTQRPGLSPALGGPGVS |
| | | RSPEPSPRPPPLPTSSSEQSSA |
| 742 | ARAP3_1 | LGAALEMFASENSPEPLSLIQPQDIVCLGVSPPPTDPGDRFP |
| | | FSFELILAGGRIQHFGTDGA |
| 743 | PERM1 | PGPASSGDQMQRLLQGPAPRPPGEPPGSPKSPGHSTGSQRP |
| | | PDSPGAPPRSPSRKKRRAVGA |
| 744 | LNPK | PSAGAAVTARPGQEIRQRTAAQRNLSPTPASPNQGPPPQV |
| | | PVSPGPPKDSSAPGGPPERTVT |
| 745 | SYDE1 | GPAAGPGGTRSPRAGYLSDGDSPERPAGPPSPTSFRPYEVG |
| | | PAARAPPAALWGRLSLHLYGL |
| 746 | CD248 | PSQSPTNQTSPISPTHPHSKAPQIPREDGPSPKLALWLPSPA |
| | | PTAAPTALGEAGLAEHSQRD |
| 747 | OFD1 | RSLESEMYLEGLGRSHIASPSPCPDRMPLPSPTESRHSLSIPP |
| | | VSSPPEQKVGLYRRQTELQ |
| 748 | CDC27_0 | PLGTGTSILSKQVQNKPKTGRSLLGGPAALSPLTPSFGILPL |
| | | ETPSPGDGSYLQNYTNTPPV |
| 749 | CDC27_1 | TKSVFSQSGNSREVTPILAQTQSSGPQTSTTPQVLSPTITSPP |
| | | NALPRRSSRLFTSDSSTTK |
| 750 | CDC27_2 | SQSGNSREVTPILAQTQSSGPQTSTTPQVLSPTITSPPNALP |
| | | RRSSRLFTSDSSTTKENSKK |
| 751 | CDC27_3 | SREVTPILAQTQSSGPQTSTTPQVLSPTITSPPNALPRRSSRL |
| | | FTSDSSTTKENSKKLKMKF |
| 752 | PODXL | STAPSSQETVQPTSPATALRTPTLPETMSSSPTAASTTHRYP |
| | | KTPSPTVAHESNWAKCEDLE |
| 753 | PODXL2 | PTADYVFPDLTEKAGSIEDTSQAQELPNLPSPLPKMNLVEP |
| | | PWHMPPREEEEEEEEEEEREK |
| 754 | TELO2_0 | RQRMDILDVLTLAAQELSRPGCLGRTPQPGSPSPNTPCLPE |
| | | AAVSQPGSAVASDWRVVVEER |
| 755 | TELO2_1 | ILDVLTLAAQELSRPGCLGRTPQPGSPSPNTPCLPEAAVSQ |
| | | PGSAVASDWRVVVEERIRSKT |
| 756 | CNTROB | TKVPLAMASSLFRVPEPPSSHSQGSGPSSGSPERGGDGLTF |
| | | PRQLMEVSQLLRLYQARGWGA |
| 757 | CIZ1_0 | QFAMPPATYDTAGLTMPTATLGNLRGYGMASPGLAAPSL |
| | | TPPQLATPNLQQFFPQATRQSLL |
| 758 | CIZ1_1 | MPTATLGNLRGYGMASPGLAAPSLTPPQLATPNLQQFFPQ |
| | | ATRQSLLGPPPVGVPMNPSQFN |
| 759 | NUP98 | GSHELENHQIADSMEFGFLPNPVAVKPLTESPFKVHLEKLS |
| | | LRQRKPDEDMKLYQTPLELKL |
| 760 | MEF2D | NQSSLQFSNPSGSLVTPSLVTSSLTDPRLLSPQQPALQRNS |
| | | VSPGLPQRPASAGAMLGGDLN |
| 761 | HMX3 | FALSQVGDLAFPRFEIPAQRFALPAHYLERSPAWWYPYTL |
| | | TPAGGHLPRPEASEKALLRDSS |
| 762 | FOXB1 | GDYSAYGVPLKPLCHAAGQTLPAIPVPIKPTPAAVPALPAL |
| | | PAPIPTLLSNSPPSLSPTSSQ |
| 763 | USP43 | SPPRPQPGHCDGDGEGGFACAPGPVPAAPGSPGEERPPGP |
| | | QPQLQLPAGDGARPPGAQGLKN |
| 764 | MLXIPL_0 | PMAPPTALLQEEPLFSPRFPFPTVPPAPGVSPLPAPAAFPPT |
| | | PQSVPSPAPTPFPIELLPLG |
| 765 | MLXIPL_1 | VSSTLLRSPGSPQETVPEFPCTFLPPTPAPTPPRPPPGPATLA |
| | | PSRPLLVPKAERLSPPAPS |
| 766 | SLX4 | PGAHRPKGPAKTKGPRHQRKHHESITPPSRSPTKEAPPGLN |
| | | DDAQIPASQESVATSVDGSDS |
| 767 | SCAP | MLPPSHPDPAFSIFPPDAPKLPENQTSPGESPERGGPAEVV |
| | | HDSPVPEVTWGPEDEELWRKL |
| 768 | RPAP1 | LQDHRDVVMLDNLPDLPPALVPSPPKRARPSPGHCLPEDE |
| | | DPEERLRRHDQHITAVLTKIIE |
| 769 | IQSEC2_0 | SYSHPHHPQSPLSPHSPIPPHPSYPPLPPPSPHTPHSPLPPTSP |
| | | HGPLHASGPPGTANPPSA |
| 770 | IQSEC2_1 | HPHHPQSPLSPHSPIPPHPSYPPLPPPSPHTPHSPLPPTSPHGP |
| | | LHASGPPGTANPPSANPK |
| 771 | IQSEC2_2 | SPHSPIPPHPSYPPLPPPSPHTPHSPLPPTSPHGPLHASGPPGT |
| | | ANPPSANPKAKPSRISTV |
| 772 | PDLIM7_0 | GTEFMQDPDEEHLKKSSQVPRTEAPAPASSTPQEPWPGPT |
| | | APSPTSRPPWAVDPAFAERYAP |
| 773 | PDLIM7_1 | LKKSSQVPRTEAPAPASSTPQEPWPGPTAPSPTSRPPWAVD |
| | | PAFAERYAPDKTSTVLTRHSQ |
| 774 | ZC3H12D | AALRGSFSRLAFSDDLGPLGPPLPVPACSLTPRLGGPDWVS |
| | | AGGRVPGPLSLPSPESQFSPG |
| 775 | IRX5 | TAPSPGYNSHLQYGADPAAAAAAAFSSYVGSPYDHTPGM |
| | | AGSLGYHPYAAPLGSYPYGDPAY |
| 776 | TACC2_0 | HRDASSIGSVGLGGFCTASESSASLDPCLVSPEVTEPRKDP |
| | | QGARGPEGSLLPSPPPSQERE |
| 777 | TACC2_1 | RGTKPNQVVCVAAGGQPEGGLPVSPEPSLLTPTEEAHPAS |
| | | SLASFPAAQIPIAVEEPGSSSR |
| 778 | TACC2_2 | DNQQENPPPTKKIGKKPVAKMPLRRPKMKKTPEKLDNTP |
| | | ASPPRSPAEPNDIPIAKGTYTFD |
| 779 | ANKLE2 | SPSDRQSWPSPAVKGRFKSQLPDLSGPHSYSPGRNSVAGS |
| | | NPAKPGLGSPGRYSPVHGSQLR |
| 780 | RAP1GAP2 | AGEGEAMEEGDSGGSQPSTTSPFKQEVFVYSPSPSSESPSL |
| | | GAAATPIIMSRSPTDAKSRNS |
| 781 | SLC26A9 | ENAPPTDPNNNQTPANGTSVSYITFSPDSSSPAQSEPPASAE |
| | | APGEPSDMLASVPPFVTFHT |
| 782 | MAP1A_0 | SQYGTPVFSAPGHALHPGEPALGEAEERCLSPDDSTVKMA |
| | | SPPPSGPPSATHTPFHQSPVEE |
| 783 | MAP1A_1 | SSPQKGLEVERWLAESPVGLPPEEEDKLTRSPFEIISPPASPP |
| | | EMVGQRVPSAPGQESPIPD |
| 784 | MAP1A_2 | HMKNEPTTPSWLADIPPWVPKDRPLPPAPLSPAPGPPTPAP |
| | | ESHTPAPFSWGTAEYDSVVAA |
| 785 | MAP1A_3 | TPSWLADIPPWVPKDRPLPPAPLSPAPGPPTPAPESHTPAPF |
| | | SWGTAEYDSVVAAVQEGAAE |
| 786 | MAP1A_4 | SDTPTFSYAALAGPTVPPRPEPGPSMEPSLTPPAVPPRAPIL |
| | | SKGPSPPLNGNILSCSPDRR |
| 787 | MAP1A_5 | RFSPSLEAAEQESGELDPGMEPAAHSLWDLTPLSPAPPASL |
| | | DLALAPAPSLPGDMGDGILPC |
| 788 | DOCK4 | TQTASPARHTTSVSPSPAGRSPLKGSVQSFTPSPVEYHSPG |
| | | LISNSPVLSGSYSSGISSLSR |
| 789 | CEP350 | LDSTAHTAKQDTVELQNQKSSAPVHAPRSHSPVKRKPDKI |
| | | TANEDPPVISKRRHYDTDEVRQ |
| 790 | MAML2 | PFNIDLGQQSQRSTPRPSLPMEKIVIKSEYSPGLTQGPSGSP |
| | | QLRPPSAGPAFSMANSALST |
| 791 | ATAD5 | FFNSYYIGKSPKKISSPKKVVTSPRKVPPPSPKSSGPKRALP |
| | | PKTLANYFKVSPKPKNNEEI |
| 792 | SMAP2 | PVPEKKLEPVVFEKVKMPQKKEDPQLPRKSSPKSTAPVMD |
| | | LLGLDAPVACSIANSKTSNTLE |
| 793 | PTPN23_0 | GPTQLIQPRAPGPHAMPVAPGPALYPAPAYTPELGLVPRSS |
| | | PQHGVVSSPYVGVGPAPPVAG |
| 794 | PTPN23_1 | GPQAAPLTIRGPSSAGQSTPSPHLVPSPAPSPGPGPVPPRPP |
| | | AAEPPPCLRRGAAAADLLSS |
| 795 | PTPN23_2 | QDLVLGGDVPISSIQATIAKLSIRPPGGLESPVASLPGPAEPP |
| | | GLPPASLPESTPIPSSSPP |
| 796 | PTPN23_3 | LPGPAEPPGLPPASLPESTPIPSSSPPPLSSPLPEAPQPKEEPP |
| | | VPEAPSSGPPSSSLELLA |
| 797 | CASC3_0 | HGDSPAPLPPQGMLVQPGMNLPHPGLHPHQTPAPLPNPGL |
| | | YPPPVSMSPGQPPPQQLLAPTY |
| 798 | CASC3_1 | GMNLPHPGLHPHQTPAPLPNPGLYPPPVSMSPGQPPPQQL |
| | | LAPTYFSAPGVMNFGNPSYPYA |
| 799 | GOLGA3 | KVQCAEVNRASTEGESPDGPGQGGLCQNGPTPPFPDPPSS |
| | | LDPTTSPVGPDASPGVAGFHDN |
| 800 | MISP_0 | RRLCDLERERWAVIQGQAVRKSSTVATLQGTPDHGDPRT |
| | | PGPPRSTPLEENVVDREQIDFLA |
| 801 | MISP_1 | GQAVRKSSTVATLQGTPDHGDPRTPGPPRSTPLEENVVDR |
| | | EQIDFLAARQQFLSLEQANKGA |
| 802 | PROSER2_0 | PPDPPAPETLLAPPPLPSTPDPPRRELRAPSPPVEHPRLLRSV |
| | | PTPLVMAQKISERMAGNEA |
| 803 | PROSER2_1 | MAQKISERMAGNEALSPTSPFREGRPGEWRTPAARGPRSG |
| | | DPGPGPSHPAQPKAPRFPSNII |
| 804 | DTL | EDLSKDSLGPTKSSKIEGAGTSISEPPSPISPYASESCGTLPL |
| | | PLRPCGEGSEMVGKENSSP |
| 805 | TOX4_0 | YLKALAAYKDNQECQATVETVELDPAPPSQTPSPPPMATV |
| | | DPASPAPASIEPPALSPSIVVN |
| 806 | TOX4_1 | APPSQTPSPPPMATVDPASPAPASIEPPALSPSIVVNSTLSSY |
| | | VANQASSGAGGQPNITKLI |
| 807 | TOX4_2 | IKSVPLPTLKMQTTLVPPTVESSPERPMNNSPEAHTVEAPS |
| | | PETICEMITDVVPEVESPSQM |
| 808 | CASKIN1_0 | GPAPATAKVKPTPQLLPPTERPMSPRSLPQSPTHRGFAYVL |
| | | PQPVEGEVGPAAPGPAPPPVP |
| 809 | CASKIN1_1 | PPPEGEARKPAKPPVSPKPVLTQPVPKLQGSPTPTSKKVPL |
| | | PGPGSPEVKRAHGTPPPVSPK |
| 810 | CASKIN1_2 | PEGEARKPAKPPVSPKPVLTQPVPKLQGSPTPTSKKVPLPG |
| | | PGSPEVKRAHGTPPPVSPKPP |
| 811 | CASKIN1_3 | VAGLPSGSAGPSPAPSPARQPPAALAKPPGTPPSLGASPAK |
| | | PPSPGAPALHVPAKPPRAAAA |
| 812 | SRGAP3 | RLRSDGAAIPRRRSGGDTHSPPRGLGPSIDTPPRAAACPSSP |
| | | HKIPLTRGRIESPEKRRMAT |
| 813 | CSTF2T | PPLMQTPIQGGIPAPGPIPAAVPGAGPGSLTPGGAMQPQLG |
| | | MPGVGPVPLERGQVQMSDPRA |
| 814 | ADNP2 | TQPVGPINRPVGPGVLPVSPSVTPGVLQAVSPGVLSVSRAV |
| | | PSGVLPAGQMTPAGQMTPAGV |
| 815 | PRR36_0 | PKPKGLQALRPPQVTPPRKDAAPALGPLSSSPLATPSPSGT |
| | | KARPVPPPDNAATPLPATLPP |
| 816 | PRR36_1 | HSSSLTCQLATPLPLAPPSPSAPPSLQTLPSPPATPPSQVPPT |
| | | QLIMSFPEAGVSSLATAAF |
| 817 | PRR36_2 | ASVSPSVSSPLQSMPPTQANPALPSLPTLLSPLATPPLSAMS |
| | | PLQGPVSPATSLGNSAFPLA |
| 818 | PRR36_3 | LQGPVSPATSLGNSAFPLAALPQPGLSALTTPPPQASPSPSP |
| | | PSLQATPHTLATLPLQDSPL |
| 819 | PRR36_4 | ETPPCPAPCPLQAPPSPLTTPPPETPSSIATPPPQAPPALASPP |
| | | LQGLPSPPLSPLATPPPQ |
| 820 | PRR36_5 | ETPSSIATPPPQAPPALASPPLQGLPSPPLSPLATPPPQAPPA |
| | | LALPPLQAPPSPPASPPLS |
| 821 | PRR36_6 | SIATPPPQAPPALASPPLQGLPSPPLSPLATPPPQAPPALALP |
| | | PLQAPPSPPASPPLSPLAT |
| 822 | PRR36_7 | PSPQAPNALAVHLLQAPFSPPPSPPVQAPFSPPASPPVSPSA |
| | | TPPSQAPPSLAAPPLQVPPS |
| 823 | PRR36_8 | LAVHLLQAPFSPPPSPPVQAPFSPPASPPVSPSATPPSQAPPS |
| | | LAAPPLQVPPSPPASPPMS |
| 824 | PRR36_9 | PSATPPSQAPPSLAAPPLQVPPSPPASPPMSPSATPPPQAPPP |
| | | LAAPPLQVPPSPPASPPMS |
| 825 | PRR36_10 | PSATPPPQAPPPLAAPPLQVPPSPPASPPMSPSATPPPRVPPL |
| | | LAAPPLQVPPSPPASLPMS |
| 826 | PRR36_11 | PSATPPPRVPPLLAAPPLQVPPSPPASLPMSPLAKPPPQAPP |
| | | ALATPPLQALPSPPASFPGQ |
| 827 | PRR36_12 | PPLQVPPSPPASLPMSPLAKPPPQAPPALATPPLQALPSPPA |
| | | SFPGQAPFSPSASLPMSPLA |
| 828 | PRR36_13 | LATPPLQALPSPPASFPGQAPFSPSASLPMSPLATPPPQAPP |
| | | VLAAPLLQVPPSPPASPTLQ |
| 829 | SOX18_0 | APGHGAAADTRGLAAGPAALAAPAAPASPPSPQRSPPRSP |
| | | EPGRYGLSPAGRGERQAADESR |
| 830 | SOX18_1 | GGCYGAPLAEALRTAPPAAPLAGLYYGTLGTPGPYPGPLS |
| | | PPPEAPPLESAEPLGPAADLWA |
| 831 | SOX18_2 | EALRTAPPAAPLAGLYYGTLGTPGPYPGPLSPPPEAPPLES |
| | | AEPLGPAADLWADVDLTEFDQ |
| 832 | DDI2 | QKENADPRPPVQFPNLPRIDFSSIAVPGTSSPRQRQPPGTQQ |
| | | SHSSPGEITSSPQGLDNPAL |
| 833 | TRIM47 | CPEGAALPAALSCLSCLASFCPAHLGPHERSPALRGHRLVP |
| | | PLRRLEESLCPRHLRPLERYC |
| 834 | SF3B2 | AHKVPPPWLIAMQRYGPPPSYPNLKIPGLNSPIPESCSFGY |
| | | HAGGWGKPPVDETGKPLYGDV |
| 835 | TBC1D25 | LLSDWDLSTAFATASKPYLQLRVDIRPSEDSPLLEDWDIIS |
| | | PKDVIGSDVLLAEKRSSLTTA |
| 836 | HCFC1 | SADGKPTTIITTTQASGAGTKPTILGISSVSPSTTKPGTTTIIK |
| | | TIPMSAIITQAGATGVTS |
| 837 | NEUROD6_0 | TPPGHGTLDNSKSMKPYNYCSAYESFYESTSPECASPQFE |
| | | GPLSPPPINYNGIFSLKQEETL |
| 838 | NEUROD6_1 | GTLDNSKSMKPYNYCSAYESFYESTSPECASPQFEGPLSPP |
| | | PINYNGIFSLKQEETLDYGKN |
| 839 | PPP1R3D | SRKLGPRSLSCLSDLDGGVALEPRACRPPGSPGRAPPPTPA |
| | | PSGCDPRLRPIILRRARSLPS |
| 840 | CACNA1I_0 | NFLCEMEEIPFNPVRSWLKHDSSQAPPSPFSPDASSPLLPM |
| | | PAEFFHPAVSASQKGPEKGTG |
| 841 | CACNA1I_1 | MEEIPFNPVRSWLKHDSSQAPPSPFSPDASSPLLPMPAEFF |
| | | HPAVSASQKGPEKGTGTGTLP |
| 842 | ZFPM1 | LLLGAPLAGPGVEARTPADRGPSPAPAPAASPQPGSRGPR |
| | | DGLGPEPQEPPPGPPPSPAAAP |
| 843 | SETD1A | PVPERVAGSPVTPLPEQEASPARPAGPTEESPPSAPLRPPEP |
| | | PAGPPAPAPRPDERPSSPIP |
| 844 | KEL | SLNFNRTLRLLMSQYGHFPFFRAYLGPHPASPHTPVIQIDQ |
| | | PEFDVPLKQDQEQKIYAQIFR |
| 845 | CCDC102A_0 | ESPQLSKGSLLTILGSPSPERMGPADSLPPTPPSGTPSPGPPP |
| | | ALPLPPAPALLADGDWESR |
| 846 | CCDC102A_1 | GSLLTILGSPSPERMGPADSLPPTPPSGTPSPGPPPALPLPPA |
| | | PALLADGDWESREELRLRE |
| 847 | NIBAN2 | TEIRGLLAQGLRPESPPPAGPLLNGAPAGESPQPKAAPEAS |
| | | SPPASPLQHLLPGKAVDLGPP |
| 848 | TANC2_0 | EEEYLEQDVENVSIGLQTEARPSQGLPVIQSPPSSPPHRDSA |
| | | YISSSPLGSHQVFDFRSSSS |
| 849 | TANC2_1 | SSSQLGSPDVSHLIRRPISVNPNEIKPHPPTPRPLLHSQSVGL |
| | | RFSPSSNSISSTSNLTPTF |
| 850 | EPOP_0 | ASAPPRPAPGLEPQRGPAASPPQEPSSRPPSPPAGLSTEPAG |
| | | PGTAPRPFLPGQPAEVDGNP |
| 851 | EPOP_1 | PGTAPRPFLPGQPAEVDGNPPPAAPEAPAASPSTASPAPAA |
| | | PGDLRQEHFDRLIRRSKLWCY |
| 852 | EPOP_2 | RPFLPGQPAEVDGNPPPAAPEAPAASPSTASPAPAAPGDLR |
| | | QEHFDRLIRRSKLWCYAKGFA |
| 853 | ICE1_0 | GSTEFVDHDHFFDEDLQAAIDFFKLPPPLLSPVPSPPPMSSP |
| | | HPGSLPSSFAPETYFGEYTD |
| 854 | ICE1_1 | FFDEDLQAAIDFFKLPPPLLSPVPSPPPMSSPHPGSLPSSFAP |
| | | ETYFGEYTDSSDNDSVQLR |
| 855 | ICE1_2 | PLISSSSPSSPASPVGQVSPFRETPVPPAMSPWPEDPRRASP |
| | | PDPSPSPSAASASERVVPSP |
| 856 | ICE1_3 | PASPVGQVSPFRETPVPPAMSPWPEDPRRASPPDPSPSPSA |
| | | ASASERVVPSPLQFCAATPKH |
| 857 | ICE1_4 | GQVSPFRETPVPPAMSPWPEDPRRASPPDPSPSPSAASASE |
| | | RVVPSPLQFCAATPKHALPVP |
| 858 | ZBED4 | TSCLIRHMWRAHRAIVLQENGGTGIPPLYSTPPTLLPSLLPP |
| | | EGELSSVSSSPVKPVRESPS |
| 859 | CAMSAP1 | ELKDAKTVLHQKSSRPPVPISNATKRSFLGSPAAGTLAELQ |
| | | PPVQLPAEGCHRHYLHPEEPE |
| 860 | TBC1D17 | ELPHNVQEILGLAPPAEPHSPSPTASPLPLSPTRAPPTPPPST |
| | | DTAPQPDSSLEILPEEEDE |
| 861 | SLC12A9 | LGFYDDAPPQDHFLTDPAFSEPADSTREGSSPALSTLFPPPR |
| | | APGSPRALNPQDYVATVADA |
| 862 | DLG3 | ISHNSSLGYLGAVESKVSYPAPPQVPPTRYSPIPRHMLAEE |
| | | DFTREPRKIILHKGSTGLGFN |
| 863 | SCARF1 | GAQSGPEGREAEESTGPEEAEAPESFPAAASPGDSATGHR |
| | | RPPLGGRTVAEHVEAIEGSVQE |
| 864 | PRRX2_0 | MLASRSASLLKSYSQEAAIEQPVAPRPTALSPDYLSWTASS |
| | | PYSTVPPYSPGSSGPATPGVN |
| 865 | PRRX2_1 | KSYSQEAAIEQPVAPRPTALSPDYLSWTASSPYSTVPPYSP |
| | | GSSGPATPGVNMANSIASLRL |
| 866 | DOK2 | EEAISAQKNAAPATPQPQPATIPASLPRPDSPYSRPHDSLPP |
| | | PSPTTPVPAPRPRGQEGEYA |
| 867 | ATF7 | GCGMVVGTASTMVTARPEQSQILIQHPDAPSPAQPQVSPA |
| | | QPTPSTGGRRRRTVDEDPDERR |
| 868 | UBQLN4 | QTEAPGLVPSLGSFGISRTPAPSAGSNAGSTPEAPTSSPATP |
| | | ATSSPTGASSAQQQLMQQMI |
| 869 | TANK | ACLPPGDHNALYVNSFPLLDPSDAPFPSLDSPGKAIRGPQQ |
| | | PIWKPFPNQDSDSVVLSGTDS |
| 870 | PDE12 | FGDPASSLFRWYKEAKPGAAEPEVGVPSSLSPSSPSSSWTE |
| | | TDVEERVYTPSNADIGLRLKL |
| 871 | RABL6 | ASPLAANGQSPSPGSQSPVVPAGAVSTGSSSPGTPQPAPQL |
| | | PLNAAPPSSVPPVPPSEALPP |
| 872 | WNK1 | AVAPSKLLTSTTSTCLPPTNLPLGTVALPVTPVVTPGQVST |
| | | PVSTTTSGVKPGTAPSKPPLT |
| 873 | MORC2 | RSQADLKKLPLEVTTRPSTEEPVRRPQRPRSPPLPAVIRNA |
| | | PSRPPSLPTPRPASQPRKAPV |
| 874 | MED12_0 | GVSSHSSHVISAQSTSTLPTTPAPQPPTSSTPSTPFSDLLMCP |
| | | QHRPLVFGLSCILQTILLC |
| 875 | MED12_1 | IDPSSSVLFEDMEKPDFSLFSPTMPCEGKGSPSPEKPDVEKE |
| | | VKPPPKEKIEGTLGVLYDQP |
| 876 | CDT1 | EKALSQLALRSAAPSSPGSPRPALPATPPATPPAASPSALK |
| | | GVSQDLLERIRAKEAQKQLAQ |
| 877 | CIPC | LQSWTVQPSFEVISAQPQLLFLHPPVPSPVSPCHTGEKKSD |
| | | SRNYLPILNSYTKIAPHPGKR |
| 878 | RBPMS2 | ARDPYDLMGAALIPASPEAWAPYPLYTTELTPAISHAAFT |
| | | YPTATAAAAALHAQVRWYPSSD |
| 879 | EPN3 | ASGSSWGPSADPWSPIPSGTVLSRSQPWDLTPMLSSSEPW |
| | | GRTPVLPAGPPTTDPWALNSPH |
| 880 | FRAT1 | LRCALGDRGRVRGRAAPYCVAELATGPSALSPLPPQADL |
| | | DGPPGAGKQGIPQPLSGPCRRGW |
| 881 | RERE_0 | PQDNESDSDSSAQQQMLQAQPPALQAPTGVTPAPSSAPPG |
| | | TPQLPTPGPTPSATAVPPQGSP |
| 882 | RERE_1 | SAQQQMLQAQPPALQAPTGVTPAPSSAPPGTPQLPTPGPTP |
| | | SATAVPPQGSPTASQAPNQPQ |
| 883 | RERE_2 | MLQAQPPALQAPTGVTPAPSSAPPGTPQLPTPGPTPSATAV |
| | | PPQGSPTASQAPNQPQAPTAP |
| 884 | RERE_3 | TPAPSSAPPGTPQLPTPGPTPSATAVPPQGSPTASQAPNQPQ |
| | | APTAPVPHTHIQQAPALHPQ |
| 885 | RERE_4 | QSALQSQQPPREQPLPPAPLAMPHIKPPPTTPIPQLPAPQAH |
| | | KHPPHLSGPSPFSMNANLPP |
| 886 | RERE_5 | RFPYPPGTLPNPLLGQPPHEHEMLRHPVFGTPYPRDLPGAI |
| | | PPPMSAAHQLQAMHAQSAELQ |
| 887 | ETV5 | YGEKCLYNYCAYDRKPPSGFKPLTPPTTPLSPTHQNPLFPP |
| | | PQATLPTSGHAPAAGPVQGVG |
| 888 | SYNJ2 | ASEEALSAVAPRDLEASSEPEPTPGAAKPETPQAPPLLPRR |
| | | PPPRVPAIKKPTLRRTGKPLS |
| 889 | NBR1_0 | TAQDLLSFELLDINIVQELERVPHNTPVDVTPCMSPLPHDS |
| | | PLIEKPGLGQIEEENEGAGFK |
| 890 | NBR1_1 | LDINIVQELERVPHNTPVDVTPCMSPLPHDSPLIEKPGLGQI |
| | | EEENEGAGFKALPDSMVSVK |
| 891 | NBR1_2 | QTLETVPLIPEVVELPPSLPRSSPCVHHHGSPGVDLPVTIPE |
| | | VSSVPDQIRGEPRGSSGLVN |
| 892 | NCKAP5L | TSHFTACGSLTRTLDSGIGTFPPPDHGSSGTPSKNLPKTKPP |
| | | RLDPPPGVPPARPPPLTKVP |
| 893 | KIF1C_0 | PFKSNPQHRESWPGMGSGEAPTPLQPPEEVTPHPATPARR |
| | | PPSPRRSHHPRRNSLDGGGRSR |
| 894 | KIF1C_1 | PQHRESWPGMGSGEAPTPLQPPEEVTPHPATPARRPPSPRR |
| | | SHHPRRNSLDGGGRSRGAGSA |
| 895 | PHLDB1 | AMSVGSSYENTSPAFSPLSSPASSGSCASHSPSGQEPGPSVP |
| | | PLVPARSSSYHLALQPPQSR |
| 896 | EIF3F | APASSSDPAAAAAATAAPGQTPASAQAPAQTPAPALPGPA |
| | | LPGPFPGGRVVRLHPVILASIV |
| 897 | UBE2O | EEKMEAVPDVERKEDKPEGQSPVKAEWPSETPVLCQQCG |
| | | GKPGVTFTSAKGEVFSVLEFAPS |
| 898 | YLPM1_0 | KQQQYKHQMLHHQRDGPPGLVPMELESPPESPPVPPGSY |
| | | MPPSQSYMPPPQPPPSYYPPTSS |
| 899 | YLPM1_1 | PSQSYMPPPQPPPSYYPPTSSQPYLPPAQPSPSQSPPSQSYL |
| | | APTPSYSSSSSSSQSYLSHS |
| 900 | YLPM1_2 | GHKKGPVVAKDTPEPVKEEVTVPATSQVPESPSSEEPPLPP |
| | | PNEEVPPPLPPEEPQSEDPEE |
| 901 | YLPM1_3 | SAGPPPVLPPPSLSSTAPPPVMPLPPLSSATPPPGIPPPGVPQ |
| | | GIPPQLTAAPVPPASSSQS |
| 902 | CDC42BPB | EPSVTVPLRSMSDPDQDFDKEPDSDSTKHSTPSNSSNPSGP |
| | | PSPNSPHRSQLPLEGLEQPAC |
| 903 | MAP3K6 | AALGVLGPEVEKEAVSPRSEELSNEGDSQQSPGQQSPLPV |
| | | EPEQGPAPLMVQLSLLRAETDR |
| 904 | PKN3_0 | RGQDFLRASQMNLGMAAWGRLVMNLLPPCSSPSTISPPK |
| | | GCPRTPTTLREASDPATPSNFLP |
| 905 | PKN3_1 | LRASQMNLGMAAWGRLVMNLLPPCSSPSTISPPKGCPRTP |
| | | TTLREASDPATPSNFLPKKTPL |
| 906 | PKN3_2 | LPKKTPLGEEMTPPPKPPRLYLPQEPTSEETPRTKRPHMEP |
| | | RTRRGPSPPASPTRKPPRLQD |
| 907 | NUAK2_0 | GKSNLKLPKGILKKKVSASAEGVQEDPPELSPIPASPGQAA |
| | | PLLPKKGILKKPRQRESGYYS |
| 908 | NUAK2_1 | KLPKGILKKKVSASAEGVQEDPPELSPIPASPGQAAPLLPK |
| | | KGILKKPRQRESGYYSSPEPS |
| 909 | CEP104 | YEQLELHSLLDAELMRRPFDLPLQPLARSGSPCHQKPMPS |
| | | LPQLEERGTENQFAEPFLQEKP |
| 910 | MAST3_0 | SSEDEGVGPGPAGPKRPVFILGEPDPPPAATPVMPKPSSLS |
| | | ADTAALSHARLRSNSIGARHS |
| 911 | MAST3_1 | LPGSPTHSLSPSPTTPCRSPAPDVPADTTASPPSASPSSSSPA |
| | | SPAAAGHTRPSSLHGLAAK |
| 912 | MAST3_2 | THSLSPSPTTPCRSPAPDVPADTTASPPSASPSSSSPASPAA |
| | | AGHTRPSSLHGLAAKLGPPR |
| 913 | MAST3_3 | RPSSLHGLAAKLGPPRPKTGRRKSTSSIPPSPLACPPISAPPP |
| | | RSPSPLPGHPPAPARSPRL |
| 914 | MAST3_4 | PRPKTGRRKSTSSIPPSPLACPPISAPPPRSPSPLPGHPPAPAR |
| | | SPRLRRGQSADKLGTGER |
| 915 | WNK4_0 | HRSWTAFSTSSSSPGTPLSPGNPFSPGTPISPGPIFPITSPPCH |
| | | PSPSPFSPISSQVSSNPS |
| 916 | WNK4_1 | TPLSPGNPFSPGTPISPGPIFPITSPPCHPSPSPFSPISSQVSSNP |
| | | SPHPTSSPLPFSSSTP |
| 917 | WNK4_2 | GNPFSPGTPISPGPIFPITSPPCHPSPSPFSPISSQVSSNPSPHP |
| | | TSSPLPFSSSTPEFPVP |
| 918 | WNK4_3 | SPSPFSPISSQVSSNPSPHPTSSPLPFSSSTPEFPVPLSQCPWS |
| | | SLPTTSPPTFSPTCSQVT |
| 919 | WNK4_4 | SAFSLAVMTVAQSLLSPSPGLLSQSPPAPPSPLPSLPLPPPV |
| | | APGGQESPSPHTAEVESEAS |
| 920 | CTTNBP2NL | NTANPRGDTSHSPTPGKVSSPLSPLSPGIKSPTIPRAERGNP |
| | | PPIPPKKPGLTPSPSATTPL |
| 921 | TAF3_0 | KVKDKGREDKMKAPAPPLVLPPKELALPLFSPATASRVPA |
| | | MLPSLLPVLPEKLFEEKEKVKE |
| 922 | TAF3_1 | RVGAGQDKIVISKVVPAPEAKPAPSQNRPKTPPPAPAPAPG |
| | | PMLVSPAPVPLPLLAQAAAGP |
| 923 | TAF3_2 | PAPEAKPAPSQNRPKTPPPAPAPAPGPMLVSPAPVPLPLLA |
| | | QAAAGPALLPSPGPAASGASA |
| 924 | C1orf116_0 | LIPPPEAFRDTQPEQCREASLPEGPGQQGHTPQLHTPSSSQE |
| | | REQTPSEAMSQKAKETVSTR |
| 925 | C1orf116_1 | EAFRDTQPEQCREASLPEGPGQQGHTPQLHTPSSSQEREQT |
| | | PSEAMSQKAKETVSTRYTQPQ |
| 926 | PHACTR4 | ITTKTPSDEREKSTCSMGSELLPMISPRSPSPPLPTHIPPEPPR |
| | | TPPFPAKTFQVVPEIEFP |
| 927 | PARP10 | TLEGLDLDGEDWLPRELEEEGPQEQPEEEVTPGHEEEEPV |
| | | APSTVAPRWLEEEAALQLALHR |
| 928 | SH3RF3 | GSCPIESEMQGAMGMEPLHRKAGSLDLNFTSPSRQAPLSM |
| | | AAIRPEPKLLPRERYRVVVSYP |
| 929 | MED1_0 | RKKADTEGKSPSHSSSNRPFTPPTSTGGSKSPGSAGRSQTP |
| | | PGVATPPIPKITIQIPKGTVM |
| 930 | MED1_1 | SNRPFTPPTSTGGSKSPGSAGRSQTPPGVATPPIPKITIQIPK |
| | | GTVMVGKPSSHSQYTSSGS |
| 931 | MED1_2 | GLSSGSSSTKMKPQGKPSSLMNPSLSKPNISPSHSRPPGGS |
| | | DKLASPMKPVPGTPPSSKAKS |
| 932 | MED1_3 | KPSSLMNPSLSKPNISPSHSRPPGGSDKLASPMKPVPGTPPS |
| | | SKAKSPISSGSGGSHMSGTS |
| 933 | ELL | GDQQLLKRVLVRKLCQPQSTGSLLGDPAASSPPGERGRSA |
| | | SPPQKRLQPPDFIDPLANKKPR |
| 934 | CASP9 | LEDTGQDMLASFLRTNRQAAKLSKPTLENLTPVVLRPEIR |
| | | KPEVLRPETPRPVDIGSGGFGD |
| 935 | PPFIA3 | SRVSSSGLDSLGRYRSSCSLPPSLTTSTLASPSPPSSGHSTPR |
| | | LAPPSPAREGTDKANHVPK |
| 936 | GAK_0 | DLLSCLLGPPEAASQGPPEDLLSEDPLLLASPAPPLSVQSTP |
| | | RGGPPAAADPFGPLLPSSGN |
| 937 | GAK_1 | EAASQGPPEDLLSEDPLLLASPAPPLSVQSTPRGGPPAAAD |
| | | PFGPLLPSSGNNSQPCSNPDL |
| 938 | GAK_2 | APCGSQASWTKSQNPDPFADLGDLSSGLQGSPAGFPPGGF |
| | | IPKTATTPKGSSSWQTSRPPAQ |
| 939 | RAPH1 | QAAPPTPTPPVPPAKKQPAFPASYIPPSPPTPPVPVPPPTLPK |
| | | QQSFCAKPPPSPLSPVPSV |
| 940 | NOTO | SRVRPPRSGRSPAPRSPTGPNTPRAPGRFESPFSVEAILARP |
| | | DPCAPAASQPSGSACVHPAF |
| 941 | SNAI3 | PRASRAAIVPLKDSLNHLNLPPLLVLPTRWSPTLGPDRHG |
| | | APEKLLGAERMPRAPGGFECFH |
| 942 | CYP4F22 | IYGTHHNPTVWPDSKVYNPYRFDPDNPQQRSPLAYVPFSA |
| | | GPRNCIGQSFAMAELRVVVALT |
| 943 | BCL9_0 | EMNRMIPGSQRHMEPGNNPIFPRIPVEGPLSPSRGDFPKGIP |
| | | PQMGPGRELEFGMVPSGMKG |
| 944 | BCL9_1 | PGINPLKSPTMHQVQSPMLGSPSGNLKSPQTPSQLAGMLA |
| | | GPAAAASIKSPPVLGSAAASPV |
| 945 | BCL9_2 | AGMLAGPAAAASIKSPPVLGSAAASPVHLKSPSLPAPSPG |
| | | WTSSPKPPLQSPGIPPNHKAPL |
| 946 | UTF1 | ATPLPTARDRDADPTWTLRFSPSPPKSADASPAPGSPPAPA |
| | | PTALATCIPEDRAPVRGPGSP |
| 947 | MICALL2_0 | GGMAGVKRASEDSEEEPSGKKAPVQAAKLPSPAPARKPP |
| | | LSPAQTNPVVQRRNEGAGGPPPK |
| 948 | MICALL2_1 | KDSSKEQARNFLKQALSALEEAGAPAPGRPSPATAAVPSS |
| | | QPKTEAPQASPLAKPLQSSSPR |
| 949 | MICALL2_2 | EEEKKPHLQGKPGRPLSPANVPALPGETVTSPVRLHPDYL |
| | | SPEEIQRQLQDIERRLDALELR |
| 950 | POU6F1_0 | PQLLLNAQGQVIATLASSPLPPPVAVRKPSTPESPAKSEVQ |
| | | PIQPTPTVPQPAVVIASPAPA |
| 951 | POU6F1_1 | ASSPLPPPVAVRKPSTPESPAKSEVQPIQPTPTVPQPAVVIA |
| | | SPAPAAKPSASAPIPITCSE |
| 952 | MICAL3 | DAPSDLKAVHSPIRSQPVTLPEARTPVSPGSPQPQPPVAAS |
| | | TPPPSPLPICSQPQPSTEATV |
| 953 | ASH1L | VFSLQSKEEQEPPILQPEIEIPSFKQGLSVSPFPKKRGRPKRQ |
| | | MRSPVKMKPPVLSVAPFVA |
| 954 | LCP2 | DEDDVHQRPLPQPALLPMSSNTFPSRSTKPSPMNPLPSSHM |
| | | PGAFSESNSSFPQSASLPPYF |
| 955 | LHX5 | PLGALEPPLAGPHAADNPRFTDMISHPDTPSPEPGLPGTLH |
| | | PMPGEVFSGGPSPPFPMSGTS |
| 956 | PRICKLE3 | EYAWVPPGLKPEQVYQFFSCLPEDKVPYVNSPGEKYRIKQ |
| | | LLHQLPPHDSEAQYCTALEEEE |
| 957 | MAP3K1_0 | NSPSGRTVKSESPGVRRKRVSPVPFQSGRITPPRRAPSPDGF |
| | | SPYSPEETNRRVNKVMRARL |
| 958 | MAP3K1_1 | MVQTKGRPHSQCLNSSPLSHHSQLMFPALSTPSSSTPSVPA |
| | | GTATDVSKHRLQGFIPCRIPS |
| 959 | DYNC1LI1 | KLQSLLAKQPPTAAGRPVDASPRVPGGSPRTPNRSVSSNV |
| | | ASVSPIPAGSKKIDPNMKAGAT |
| 960 | ZFHX3 | FDNTPLQALNLPTAYPALQGIPPVLLPGLNSPSLPGFTPSNT |
| | | ALTSPKPNLMGLPSTTVPSP |
| 961 | CCNO | LHPLNPCPLPGDSGICDLFESPSSGSDGAESPSAARGGSPLP |
| | | GPAQPVAQLDLQTFRDYGQS |
| 962 | WAC_0 | SHSCTTPSTSSASGLNPTSAPPTSASAVPVSPVPQSPIPPLLQ |
| | | DPNLLRQLLPALQATLQLN |
| 963 | WAC_1 | SPRISTPQTNTVPIKPLISTPPVSSQPKVSTPVVKQGPVSQSA |
| | | TQQPVTADKQQGHEPVSPR |
| 964 | SCML2 | LPTQQVRRSSRIKPPGPTAVPKRSSSVKNITPRKKGPNSGK |
| | | KEKPLPVICSTSAASLKSLTR |
| 965 | ZNF512B | CGKTYRSKAGHDYHVRSEHTAPPPEEPTDKSPEAEDPLGV |
| | | ERTPSGRVRRTSAQVAVFHLQE |
| 966 | SCYL1_0 | AVTGVSSLTSKLIRSHPTTAPTETNIPQRPTPEGVPAPAPTP |
| | | VPATPTTSGHWETQEEDKDT |
| 967 | SCYL1_1 | KLIRSHPTTAPTETNIPQRPTPEGVPAPAPTPVPATPTTSGH |
| | | WETQEEDKDTAEDSSTADRW |
| 968 | TRIOBP_0 | ISRASSTQQETSRASSTQEDTPRASSTQEDTPRASSTQWNT |
| | | PRASSPSRSTQLDNPRTSSTQ |
| 969 | TRIOBP_1 | AAYGAPLTSPEPSQPPCAVCIGHRDAPRASSPPRYLQHDPF |
| | | PFFPEPRAPESEPPHHEPPYI |
| 970 | TRIOBP_2 | RAPESEPPHHEPPYIPPAVCIGHRDAPRASSPPRHTQFDPFP |
| | | FLPDTSDAEHQCQSPQHEPL |
| 971 | TRIOBP_3 | AEHQCQSPQHEPLQLPAPVCIGYRDAPRASSPPRQAPEPSL |
| | | LFQDLPRASTESLVPSMDSLH |
| 972 | TRIOBP_4 | SLVPSMDSLHECPHIPTPVCIGHRDAPSFSSPPRQAPEPSLFF |
| | | QDPPGTSMESLAPSTDSLH |
| 973 | TRIOBP_5 | SLAPSTDSLHGSPVLIPQVCIGHRDAPRASSPPRHPPSDLAF |
| | | LAPSPSPGSSGGSRGSAPPG |
| 974 | NELFA | LNNEPALPSTSYLPSTPSVVPASSYIPSSETPPAPSSREASRP |
| | | PEEPSAPSPTLPAQFKQRA |
| 975 | BCR | ASASRPQPAPADGADPPPAEEPEARPDGEGSPGKARPGTA |
| | | RRPGAAASGERDDRGPPASVAA |
| 976 | EPS15_0 | VSNVVITKNVFEETSVKSEDEPPALPPKIGTPTRPCPLPPGK |
| | | RSINKLDSPDPFKLNDPFQP |
| 977 | EPS15_1 | LPPGKRSINKLDSPDPFKLNDPFQPFPGNDSPKEKDPEIFCD |
| | | PFTSATTTTNKEADPSNFAN |
| 978 | JCAD | HSQQQSPTEKAGASGQPPSGPPGTGNEYGVSPRLPQGLPA |
| | | HPRPVTAYDGFVQYIPFDDPRL |
| 979 | EP400 | QAAQLAGQRQSQQQYDPSTGPPVQNAASLHTPLPQLPGR |
| | | LPPAGVPTAALSSALQFAQQPQV |
| 980 | SGIP1 | ESAFDEQKTEVLLDQPEIWGSGQPINPSMESPKLTRPFPTG |
| | | TPPPLPPKNVPATPPRTGSPL |
| 981 | FBXO42 | GQCVVVFSQAPSGRAPLSPSLNSRPSPISATPPALVPETREY |
| | | RSQSPVRSMDEAPCVNGRWG |
| 982 | SP2_0 | SPLALLAATCSKIGPPAVEAAVTPPAPPQPTPRKLVPIKPAP |
| | | LPLSPGKNSFGILSSKGNIL |
| 983 | SP2_1 | PAVEAAVTPPAPPQPTPRKLVPIKPAPLPLSPGKNSFGILSS |
| | | KGNILQIQGSQLSASYPGGQ |
| 984 | COL4A1_0 | PGSPGLPGPKGEPGKIVPLPGPPGAEGLPGSPGFPGPQGDR |
| | | GFPGTPGRPGLPGEKGAVGQP |
| 985 | COL4A1_1 | IVPLPGPPGAEGLPGSPGFPGPQGDRGFPGTPGRPGLPGEK |
| | | GAVGQPGIGFPGPPGPKGVDG |
| 986 | CHAF1B_0 | VLNMRTPDTAKKTKSQTHRGSSPGPRPVEGTPASRTQDPS |
| | | SPGTTPPQARQAPAPTVIRDPP |
| 987 | CHAF1B_1 | KKTKSQTHRGSSPGPRPVEGTPASRTQDPSSPGTTPPQARQ |
| | | APAPTVIRDPPSITPAVKSPL |
| 988 | C6orf132_0 | RSPAEPKGSALGPNPEPHLTFPRSFKVPPPTPVRTSSIPVQE |
| | | AQEAPRKEEGATKKAPSRLP |
| 989 | C6orf132_1 | KNLPPQSTTLLPTTSLQPKAMLGPAIPPKATPEPAIPPKATL |
| | | WPATPPKATLGPATPLKATS |
| 990 | C6orf132_2 | LQPKAMLGPAIPPKATPEPAIPPKATLWPATPPKATLGPAT |
| | | PLKATSGPTTPLKATSGPAIA |
| 991 | PCGF2_0 | SGASECESVSDKAPSPATLPATSSSLPSPATPSHGSPSSHGP |
| | | PATHPTSPTPPSTASGATTA |
| 992 | PCGF2_1 | CESVSDKAPSPATLPATSSSLPSPATPSHGSPSSHGPPATHP |
| | | TSPTPPSTASGATTAANGGS |
| 993 | PCGF2_2 | ATSSSLPSPATPSHGSPSSHGPPATHPTSPTPPSTASGATTA |
| | | ANGGSLNCLQTPSSTSRGRK |
| 994 | SRCAP_0 | GPALLTSVTPPLAPVVPAAPGPPSLAPSGASPSASALTLGL |
| | | ATAPSLSSSQTPGHPLLLAPT |
| 995 | SRCAP_1 | GAASTLVPGVSETSASPGSPSVRSMSGPESSPPIGGPCEAAP |
| | | SSSLPTPPQQPFIARRHIEL |
| 996 | SRCAP_2 | IVADPVLEPQLIPGPQPLGPQPVHRPNPLLSPVEKRRRGRPP |
| | | KARDLPIPGTISSAGDGNSE |
| 997 | SYNPO2_0 | RMVPMNRTAKPFPGSVNQPATPFSPTRNMTSPIADFPAPPP |
| | | YSAVTPPPDAFSRGVSSPIAG |
| 998 | SYNPO2_1 | MKQALPPRPVNAASPTNVQASSVYSVPAYTSPPSFFAEAS |
| | | SPVSASPVPVGIPTSPKQESAS |
| 999 | SYNPO2_2 | NAASPTNVQASSVYSVPAYTSPPSFFAEASSPVSASPVPVG |
| | | IPTSPKQESASSSYFVAPRPK |
| 1000 | CHRNA10_0 | ARALLLGHLARGLCVRERGEPCGQSRPPELSPSPQSPEGG |
| | | AGPPAGPCHEPRCLCRQEALLH |
| 1001 | CHRNA10_1 | LGHLARGLCVRERGEPCGQSRPPELSPSPQSPEGGAGPPAG |
| | | PCHEPRCLCRQEALLHHVATI |
| 1002 | KIAA1522_0 | LPRPPTTGGSEGAGAAPCPPNPANSWVPGLSPGGSRRPPRS |
| | | PERTLSPSSGYSSQSGTPTLP |
| 1003 | KIAA1522_1 | APSDRSGPQILTPLGDRFVIPPHPKVPAPFSPPPSKPRSPNPA |
| | | APALAAPAVVPGPVSTTDA |
| 1004 | KIAA1522_2 | MADFPPPEEAFFSVASPEPAGPSGSPELVSSPAASSSSATAL |
| | | QIQPPGSPDPPPAPPAPAPA |
| 1005 | KIAA1522_3 | SPETQADLQRNLVAELRSISEQRPPQAPKKSPKAPPPVARK |
| | | PSVGVPPPASPSYPRAEPLTA |
| 1006 | KIAA1522_4 | EQRPPQAPKKSPKAPPPVARKPSVGVPPPASPSYPRAEPLT |
| | | APPTNGLPHTQDRTKRELAEN |
| 1007 | BCLAF1_0 | DEFNKSSATSGDIWPGLSAYDNSPRSPHSPSPIATPPSQSSS |
| | | CSDAPMLSTVHSAKNTPSQH |
| 1008 | BCLAF1_1 | KNTPSQHSHSIQHSPERSGSGSVGNGSSRYSPSQNSPIHHIP |
| | | SRRSPAKTIAPQNAPRDESR |
| 1009 | BCLAF1_2 | QHSHSIQHSPERSGSGSVGNGSSRYSPSQNSPIHHIPSRRSP |
| | | AKTIAPQNAPRDESRGRSSF |
| 1010 | BCLAF1_3 | ERSGSGSVGNGSSRYSPSQNSPIHHIPSRRSPAKTIAPQNAP |
| | | RDESRGRSSFYPDGGDQETA |
| 1011 | JPH1 | DYVKQRFQEGVDAKENPEEKVPEKPPTPKESPHFYRKGTT |
| | | PPRSPEASPKHSHSPASSPKPL |
| 1012 | NCOA2 | YALKMNSPSQSSPGMNPGQPTSMLSPRHRMSPGVAGSPRI |
| | | PPSQFSPAGSLHSPVGVCSSTG |
| 1013 | RBSN | AVAGNPFIQPDSPAPNPFSEEDEHPQQRLSSPLVPGNPFEEP |
| | | TCINPFEMDSDSGPEAEEPI |
| 1014 | PDLIM5 | LDSPTSGRPGVTSLTAAAAFKPVGSTGVIKSPSWQRPNQG |
| | | VPSTGRISNSATYSGSVAPANS |
| 1015 | HOXC4 | RGHGPAQAGHHHPEKSQSLCEPAPLSGASASPSPAPPACS |
| | | QPAPDHPSSAASKQPIVYPWMK |
| 1016 | PPP1R13L_0 | GSPRKAATDGADTPFGRSESAPTLHPYSPLSPKGRPSSPRT |
| | | PLYLQPDAYGSLDRATSPRPR |
| 1017 | PPP1R13L_1 | LQPQPQPQPQPQSQPQPQLPPQPQTQPQTPTPAPQHPQQT |
| | | WPPVNEGPPKPPTELEPEPEIE |
| 1018 | PPP1R13L_2 | HPQQTWPPVNEGPPKPPTELEPEPEIEGLLTPVLEAGDVDE |
| | | GPVARPLSPTRLQPALPPEAQ |
| 1019 | FAM184A | NRFVSVPNLSALESGGVGNGHPNRLDPIPNSPVHDIEFNSS |
| | | KPLPQPVPPKGPKTFLSPAQS |
| 1020 | SCRIB | YRALAAVPSAGSVQRVPSGAAGGKMAESPCSPSGQQPPSP |
| | | PSPDELPANVKQAYRAFAAVPT |
| 1021 | ARHGEF17_0 | RGAWPSVTEMRKLFGGPGSRRPSADSESPGTPSPDGAAW |
| | | EPPARESRQPPTPPPRTCFPLAG |
| 1022 | ARHGEF17_1 | IAVCSARILCIGAVPGLQPRCHREPPPSLRSPPETAPEPAGP |
| | | ELDVEAAADEEAATLAEPGP |
| 1023 | ATN1_0 | SDSSSGLSQGPARPYHPPPLFPPSPQPPDSTPRQPEASFEPHP |
| | | SVTPTGYHAPMEPPTSRMF |
| 1024 | ATN1_1 | ASGPPLSATQIKQEPAEEYETPESPVPPARSPSPPPKVVDVP |
| | | SHASQSARFNKHLDRGFNSC |
| 1025 | ARMH4 | KTEKFEADTDHRTTSFPGAESTAGSEPGSLTPDKEKPSQM |
| | | TADNTQAAATKQPLETSEYTLS |
| 1026 | TSC22D4_0 | YEGPGSPGASDPPTPQPPTGPPPRLPNGEPSPDPGGKGTPR |
| | | NGSPPPGAPSSRFRVVKLPHG |
| 1027 | TSC22D4_1 | ASDPPTPQPPTGPPPRLPNGEPSPDPGGKGTPRNGSPPPGAP |
| | | SSRFRVVKLPHGLGEPYRRG |
| 1028 | TSC22D4_2 | TPQPPTGPPPRLPNGEPSPDPGGKGTPRNGSPPPGAPSSRFR |
| | | VVKLPHGLGEPYRRGRWTCV |
| 1029 | BCAR3_0 | HGTLPRKKKGPPPIRSCDDFSHMGTLPHSKSPRQNSPVTQ |
| | | DGIQESPWQDRHGETFTFRDPH |
| 1030 | BCAR3_1 | RKKKGPPPIRSCDDFSHMGTLPHSKSPRQNSPVTQDGIQES |
| | | PWQDRHGETFTFRDPHLLDPT |
| 1031 | SMAD5_0 | LLVQFRNLSHNEPHMPQNATFPDSFHQPNNTPFPLSPNSPY |
| | | PPSPASSTYPNSPASSGPGSP |
| 1032 | SMAD5_1 | RNLSHNEPHMPQNATFPDSFHQPNNTPFPLSPNSPYPPSPA |
| | | SSTYPNSPASSGPGSPFQLPA |
| 1033 | ARGFX | KKQQQQQSAKQRNQILPSKKNVPTSPRTSPSPYAFSPVISD |
| | | FYSSLPSQPLDPSNWAWNSTF |
| 1034 | SYNPO_0 | VLRPEPTKQPPYQLRPSLFVLSPIKEPAKVSPRAASPAKPSS |
| | | LDLVPNLPKGALPPSPALPR |
| 1035 | SYNPO_1 | PTKQPPYQLRPSLFVLSPIKEPAKVSPRAASPAKPSSLDLVP |
| | | NLPKGALPPSPALPRPSRSS |
| 1036 | CHAMP1_0 | PEHQKIPCNSAEPKSIPALSMETQKLGSVLSPESPKPTPLTP |
| | | LEPQKPGSVVSPELQTPLPS |
| 1037 | CHAMP1_1 | SPEPPKSVPVCESQKLAPVPSPEPQKPAPVSPESVKATLSNP |
| | | KPQKQSHFPETLGPPSASSP |
| 1038 | PLEKHA7_0 | KNPERKTVPLFPHPPVPSLSTSESKPPPQPSPPTSPVRTPLEV |
| | | RLFPQLQTYVPYRPHPPQL |
| 1039 | PLEKHA7_1 | LEVRLFPQLQTYVPYRPHPPQLRKVTSPLQSPTKAKPKVE |
| | | DEAPPRPPLPELYSPEDQPPAV |
| 1040 | PLEKHA7_2 | KVTSPLQSPTKAKPKVEDEAPPRPPLPELYSPEDQPPAVPP |
| | | LPREATIIRHTSVRGLKRQSD |
| 1041 | SEC24C | SQPNHVSSPPQALPPGTQMTGPLGPLPPMHSPQQPGYQPQ |
| | | QNGSFGPARGPQSNYGGPYPAA |
| 1042 | ARHGEF10 | QAPSAPETGGAGASEAPAPTGGEDGAGAETTPVAEPTKLV |
| | | LPMKVNPYSVIDITPFQEDQPP |
| 1043 | EVL | SEAGRKPWERSNSVEKPVSSILSRTPSVAKSPEAKSPLQSQ |
| | | PHSRMKPAGSVNDMALDAFDL |
| 1044 | PLIN1_0 | AERRASGAPSAGPEPAPRLAQPRRSLRSAQSPGAPPGPGLE |
| | | DEVATPAAPRPGFPAVPREKP |
| 1045 | PLIN1_1 | APRLAQPRRSLRSAQSPGAPPGPGLEDEVATPAAPRPGFPA |
| | | VPREKPKRRVSDSFFRPSVME |
| 1046 | THRAP3 | WPDATYGTGSASRASAVSELSPRERSPALKSPLQSVVVRR |
| | | RSPRPSPVPKPSPPLSSTSQMG |
| 1047 | PLEKHG4 | VLSEGPGPSGVESLLCPMSSHLSLAQGESDTPGVGLVGDP |
| | | GPSRAMPSGLSPGALDSDPVGL |
| 1048 | FNBP4 | DSTLANFLAEIDAITAPQPAAPVGASAPPPTPPRPEPKEAAT |
| | | STLSSSTSNGTDSTQTSGWQ |
| 1049 | RREB1_0 | EEAGSSEQPSPCPAPGPSLPVTLGPSGILESPMAPAPAATPE |
| | | PPAQPLQGPVQLAVPIYSSA |
| 1050 | RREB1_1 | ASATKDCSHREEKVTAGWPSEPGQGDLNPESPAALGQDL |
| | | LEPRSKRPAHPILATADGASQLV |
| 1051 | IRX2_0 | LKQPSLGPGCGPPGLPAAAAPASTGAPPGGSPYPASPLLGR |
| | | PLYYTSPFYGNYTNYGNLNAA |
| 1052 | IRX2_1 | LGPGCGPPGLPAAAAPASTGAPPGGSPYPASPLLGRPLYYT |
| | | SPFYGNYTNYGNLNAALQGQG |
| 1053 | PDHX | DALKLVQLKQTGKITESRPTPAPTATPTAPSPLQATAGPSY |
| | | PRPVIPPVSTPGQPNAVGTFT |
| 1054 | SALL2 | PFSAGGVGRSHKPTPAPSPALPGSTDQLIASPHLAFPSTTGL |
| | | LAAQCLGAARGLEATASPGL |
| 1055 | AUTS2 | PLSTQPPQGPPEAQLQPAPQPQVQRPPRPQSPTQLLHQNLP |
| | | PVQAHPSAQSLSQPLSAYNSS |
| 1056 | FOSL1_0 | MSGSQELQWMVQPHFLGPSSYPRPLTYPQYSPPQPRPGVI |
| | | RALGPPPGVRRRPCEQISPEEE |
| 1057 | FOSL1_1 | RPVPCISLSPGPVLEPEALHTPTLMTTPSLTPFTPSLVFTYPS |
| | | TPEPCASAHRKSSSSSGDP |
| 1058 | BSX | KPLREVAPDHFASSLASRVPLLDYGYPLMPTPTLLAPHAH |
| | | HPLHKGDHHHPYFLTTSGMPVP |
| 1059 | PRRC2A_0 | VSSGPCSQRSSPDGGLKGAAEGPPKRPGGSSPLNAVPCEG |
| | | PPGSEPPRRPPPAPHDGDRKEL |
| 1060 | PRRC2A_1 | PLSLLPVGPALQPPSLAVRPPPAPATRVLPSPARPFPASLGR |
| | | AELHPVELKPFQDYQKLSSN |
| 1061 | DBNDD1 | AEVFADSDDENLNTESPAGLHPLPRAGYLRSPSWTRTRAE |
| | | QSHEKQPLGDPERQATVLDTFL |
| 1062 | TENT2 | YSLVLMVLHYLQTLPEPILPSLQKIYPESFSPAIQLHLVHQA |
| | | PCNVPPYLSKNESNLGDLLL |
| 1063 | PACS2_0 | VVKVGIVEPSSATSGDSDDAAPSGSGTLSSTPPSASPAAKE |
| | | ASPTPPSSPSVSGGLSSPSQG |
| 1064 | PACS2_1 | IVEPSSATSGDSDDAAPSGSGTLSSTPPSASPAAKEASPTPP |
| | | SSPSVSGGLSSPSQGVGAEL |
| 1065 | GRAMD1A | RASSDADHGAEEDKEEQVDSQPDASSSQTVTPVAEPPSTE |
| | | PTQPDGPTTLGPLDLLPSEELL |
| 1066 | CHD4_0 | KVQEFEHVNGRWSMPELAEVEENKKMSQPGSPSPKTPTPS |
| | | TPGDTQPNTPAPVPPAEDGIKI |
| 1067 | CHD4_1 | EHVNGRWSMPELAEVEENKKMSQPGSPSPKTPTPSTPGDT |
| | | QPNTPAPVPPAEDGIKIEENSL |
| 1068 | CHD4_2 | VNGRWSMPELAEVEENKKMSQPGSPSPKTPTPSTPGDTQP |
| | | NTPAPVPPAEDGIKIEENSLKE |
| 1069 | CHD4_3 | RWSMPELAEVEENKKMSQPGSPSPKTPTPSTPGDTQPNTP |
| | | APVPPAEDGIKIEENSLKEEES |
| 1070 | FAM168A | ASSAAFRYTAGTPYKVPPTQSNTAPPPYSPSPNPYQTAMY |
| | | PIRSAYPQQNLYAQGAYYTQPV |
| 1071 | HOXD12 | FYFSNLRPNGGQLAALPPISYPRGALPWAATPASCAPAQP |
| | | AGATAFGGFSQPYLAGSGPLGL |
| 1072 | CEP85 | PHSNSSGVLPLGLQPAPGLSKPLPSQVWQPSPDTWHPREQ |
| | | SCELSTCRQQLELIRLQMEQMQ |
| 1073 | EIF4G1 | DDRSQGAIIADRPGLPGPEHSPSESQPSSPSPTPSPSPVLEPG |
| | | SEPNLAVLSIPGDTMTTIQ |
| 1074 | FCHO1_0 | SPENVEDSGLDSPSHAAPGPSPDSWVPRPGTPQSPPSCRAP |
| | | PPEARGIRAPPLPDSPQPLAS |
| 1075 | FCHO1_1 | QSPPSCRAPPPEARGIRAPPLPDSPQPLASSPGPWGLEALA |
| | | GGDLMPAPADPTAREGLAAPP |
| 1076 | USP25 | LSYGSGPKRFPLVDVLQYALEFASSKPVCTSPVDDIDASSP |
| | | PSGSIPSQTLPSTTEQQGALS |
| 1077 | RXRB | EQQTPEPEPGEAGRDGMGDSGRDSRSPDSSSPNPLPQGVP |
| | | PPSPPGPPLPPSTAPSLGGSGA |
| 1078 | SNW1 | MQKDPMEPPRFKINKKIPRGPPSPPAPVMHSPSRKMTVKE |
| | | QQEWKIPPCISNWKNAKGYTIP |
| 1079 | APC_0 | KKQNLKNNSKVFNDKLPNNEDRVRGSFAFDSPHHYTPIEG |
| | | TPYCFSRNDSLSSLDFDDDDVD |
| 1080 | APC_1 | SRGRTMIHIPGVRNSSSSTSPVSKKGPPLKTPASKSPSEGQT |
| | | ATTSPRGAKPSVKSELSPVA |
| 1081 | APC_2 | MIHIPGVRNSSSSTSPVSKKGPPLKTPASKSPSEGQTATTSP |
| | | RGAKPSVKSELSPVARQTSQ |
| 1082 | APC_3 | SSSTSPVSKKGPPLKTPASKSPSEGQTATTSPRGAKPSVKSE |
| | | LSPVARQTSQIGGSSKAPSR |
| 1083 | RAPGEF6 | SQSQDDSIVGTRHCRHSLAIMPIPGTLSSSSPDLLQPTTSML |
| | | DFSNPSDIPDQVIRVFKVDQ |
| 1084 | SMTN | EPPLEPAEAQCLTAEVPGSPEPPPSPPKTTSPEPQESPTLPST |
| | | EGQVVNKLLSGPKETPAAQ |
| 1085 | PKN1 | TGTLEVRVVGCRDLPETIPWNPTPSMGGPGTPDSRPPFLSR |
| | | PARGLYSRSGSLSGRSSLKAE |
| 1086 | ASXL2_0 | FQVSPQPFLNRGDRIQVRKVPPLKIPVSRISPMPFHPSQVSP |
| | | RARFPVSITSPNRTGARTLA |
| 1087 | ASXL2_1 | RGDRIQVRKVPPLKIPVSRISPMPFHPSQVSPRARFPVSITSP |
| | | NRTGARTLADIKAKAQLVK |
| 1088 | ASXL2_2 | FSSTVLPLPADSPTHQPLLLPPLQTPKLYGSPTQIGPSYRGM |
| | | INVSTSSDMDHNSAVPGSQV |
| 1089 | AOC1 | NENIENEDLVAWVTVGFLHIPHSEDIPNTATPGNSVGFLLR |
| | | PFNFFPEDPSLASRDTVIVWP |
| 1090 | MAP3K7 | ISGNGQPRRRSIQDLTVTGTEPGQVSSRSSSPSVRMITTSGP |
| | | TSEKPTRSHPWTPDDSTDTN |
| 1091 | TEPSIN | PLPGSQVFLQPLSSTPVSSRSPAPSSGMPSSPVPTPPPDASPI |
| | | PAPGDPSEAEARLAESRRW |
| 1092 | KIDINS220 | HSGKRGIPHSLSGLQDPIIARMSICSEDKKSPSECSLIASSPE |
| | | ENWPACQKAYNLNRTPSTV |
| 1093 | CAPRIN1_0 | FTSGEKEQVDEWTVETVEVVNSLQQQPQAASPSVPEPHSL |
| | | TPVAQADPLVRRQRVQDLMAQM |
| 1094 | CAPRIN1_1 | EWTVETVEVVNSLQQQPQAASPSVPEPHSLTPVAQADPLV |
| | | RRQRVQDLMAQMQGPYNFIQDS |
| 1095 | TEAD4 | PGQAGTSHDVKPFSQQTYAVQPPLPLPGFESPAGPAPSPSA |
| | | PPAPPWQGRSVASSKLWMLEF |
| 1096 | PRRC1 | PVRPSAPLPFVPPPAVPSVPPLVTSMPPPVSPSTAAAFGNPP |
| | | VSHFPPSTSAPNTLLPAPPS |
| 1097 | TMPRSS13_0 | SHGNASPARTPSAGASPAQASPAGTPPGRASPAQASPAQA |
| | | SPAGTPPGRASPAQASPAGTPP |
| 1098 | TMPRSS13_1 | SPARTPSAGASPAQASPAGTPPGRASPAQASPAQASPAGTP |
| | | PGRASPAQASPAGTPPGRASP |
| 1099 | TMPRSS13_2 | PSAGASPAQASPAGTPPGRASPAQASPAQASPAGTPPGRA |
| | | SPAQASPAGTPPGRASPGRASP |
| 1100 | TMPRSS13_3 | SPAGTPPGRASPAQASPAQASPAGTPPGRASPAQASPAGTP |
| | | PGRASPGRASPAQASPAQASP |
| 1101 | TMPRSS13_4 | PPGRASPAQASPAQASPAGTPPGRASPAQASPAGTPPGRAS |
| | | PGRASPAQASPAQASPARASP |
| 1102 | TMPRSS13_5 | SPAQASPAGTPPGRASPAQASPAGTPPGRASPGRASPAQAS |
| | | PAQASPARASPALASLSRSSS |
| 1103 | TMPRSS13_6 | SPAGTPPGRASPAQASPAGTPPGRASPGRASPAQASPAQAS |
| | | PARASPALASLSRSSSGRSSS |
| 1104 | TMPRSS13_7 | PPGRASPAQASPAGTPPGRASPGRASPAQASPAQASPARA |
| | | SPALASLSRSSSGRSSSARSAS |
| 1105 | TMPRSS13_8 | SPAQASPAGTPPGRASPGRASPAQASPAQASPARASPALAS |
| | | LSRSSSGRSSSARSASVTTSP |
| 1106 | TMPRSS13_9 | SPAGTPPGRASPGRASPAQASPAQASPARASPALASLSRSS |
| | | SGRSSSARSASVTTSPTRVYL |
| 1107 | TMPRSS13_10 | SLSRSSSGRSSSARSASVTTSPTRVYLVRATPVGAVPIRSSP |
| | | ARSAPATRATRESPGTSLPK |
| 1108 | TMPRSS13_11 | SSARSASVTTSPTRVYLVRATPVGAVPIRSSPARSAPATRA |
| | | TRESPGTSLPKFTWREGQKQL |
| 1109 | SUPT5H_0 | THSPASYHPTPSPMAYQASPSPSPVGYSPMTPGAPSPGGY |
| | | NPHTPGSGIEQNSSDWVTTDIQ |
| 1110 | SUPT5H_1 | SYHPTPSPMAYQASPSPSPVGYSPMTPGAPSPGGYNPHTP |
| | | GSGIEQNSSDWVTTDIQVKVRD |
| 1111 | SOX5 | ATAGVVYPGAIAMAGMPSPHLPSEHSSVSSSPEPGMPVIQS |
| | | TYGVKGEEPHIKEEIQAEDIN |
| 1112 | AIRE | TWRCSSCLQATVQEVQPRAEEPRPQEPPVETPLPPGLRSA |
| | | GEEVRGPPGEPLAGMDTTLVYK |
| 1113 | SEC16A_0 | HGGHPHGNMPGLDRPLSRQNPHDGVVTPAASPSLPQPGL |
| | | QMPGQWGPVQGGPQPSGQHRSPC |
| 1114 | SEC16A_1 | PDGPLASPARVPMFPVPLPPGPLEPGPGCVTPGPALGFLEP |
| | | SGPGLPPGVPPLQERRHLLQE |
| 1115 | SEC16A_2 | GTQRSEPALAPADFVAPLAPLPIPSNLFVPTPDAEEPQLPD |
| | | GTGREGPAAARGLANPEPAPE |
| 1116 | MYO18B | GDVLLMVAKLDPDSAKPEKTHPHDAPPCKTSPPATDTGK |
| | | EKKGETSRTPCGSQASTEILAPK |
| 1117 | NAV2 | NSVKVNPAAQPVSSPAQTSLQPGAKYPDVASPTLRRLFGG |
| | | KPTKQVPIATAENMKNSVVISN |
| 1118 | TCF7L2_0 | LEEAAKRQDGGLFKGPPYPGYPFIMIPDLTSPYLPNGSLSP |
| | | TARTLHFQSGSTHYSAYKTIE |
| 1119 | TCF7L2_1 | HFTPGNPPPHLPADVDPKTGIPRPPHPPDISPYYPLSPGTVG |
| | | QIPHPLGWLVPQQGQPVYPI |
| 1120 | CHEK2 | TLSSLETVSTQELYSIPEDQEPEDQEPEEPTPAPWARLWAL |
| | | QDGFANLECVNDNYWFGRDKS |
| 1121 | IL15RA_0 | CIRDPALVHQRPAPPSTVTTAGVTPQPESLSPSGKEPAASSP |
| | | SSNNTAATTAAIVPGSQLMP |
| 1122 | IL15RA_1 | RPAPPSTVTTAGVTPQPESLSPSGKEPAASSPSSNNTAATT |
| | | AAIVPGSQLMPSKSPSTGTTE |
| 1123 | UHRF2 | LNDIIQLLVRPDPDHLPGTSTQIEAKPCSNSPPKVKKAPRV |
| | | GPSNQPSTSARARLIDPGFGI |
| 1124 | PDLIM2_0 | DSSLEVLATRFQGSVRTYTESQSSLRSSYSSPTSLSPRAGSP |
| | | FSPPPSSSSLTGEAAISRSF |
| 1125 | PDLIM2_1 | VLATRFQGSVRTYTESQSSLRSSYSSPTSLSPRAGSPFSPPP |
| | | SSSSLTGEAAISRSFQSLAC |
| 1126 | PDLIM2_2 | FQGSVRTYTESQSSLRSSYSSPTSLSPRAGSPFSPPPSSSSLT |
| | | GEAAISRSFQSLACSPGLP |
| 1127 | PNPLA6 | HNYLGLTNELFSHEIQPLRLFPSPGLPTRTSPVRGSKRMVS |
| | | TSATDEPRETPGRPPDPTGAP |
| 1128 | GP1BA_0 | TQESTKEQTTFPPRWTPNFTLHMESITFSKTPKSTTEPTPSP |
| | | TTSEPVPEPAPNMTTLEPTP |
| 1129 | GP1BA_1 | TPKSTTEPTPSPTTSEPVPEPAPNMTTLEPTPSPTTPEPTSEP |
| | | APSPTTPEPTSEPAPSPTT |
| 1130 | GP1BA_2 | TEPTPSPTTSEPVPEPAPNMTTLEPTPSPTTPEPTSEPAPSPT |
| | | TPEPTSEPAPSPTTPEPTS |
| 1131 | GP1BA_3 | EPVPEPAPNMTTLEPTPSPTTPEPTSEPAPSPTTPEPTSEPAP |
| | | SPTTPEPTSEPAPSPTTPE |
| 1132 | GP1BA_4 | PEPAPNMTTLEPTPSPTTPEPTSEPAPSPTTPEPTSEPAPSPT |
| | | TPEPTSEPAPSPTTPEPTP |
| 1133 | GP1BA_5 | EPTPSPTTPEPTSEPAPSPTTPEPTSEPAPSPTTPEPTSEPAPS |
| | | PTTPEPTPIPTIATSPTI |
| 1134 | GP1BA_6 | PSPTTPEPTSEPAPSPTTPEPTSEPAPSPTTPEPTSEPAPSPTT |
| | | PEPTPIPTIATSPTILVS |
| 1135 | GP1BA_7 | EPAPSPTTPEPTSEPAPSPTTPEPTSEPAPSPTTPEPTPIPTIAT |
| | | SPTILVSATSLITPKST |
| 1136 | ADAMTS7 | FLPEEDTPIGAPDLGLPSLSWPRVSTDGLQTPATPESQNDF |
| | | PVGKDSQSQLPPPWRDRTNEV |
| 1137 | TRIB1 | LDADDAAAVAAKCPRLSECSSPPDYLSPPGSPCSPQPPPAA |
| | | PGAGGGSGSAPGPSRIADYLL |
| 1138 | GMEB1 | QNVVLMPVSTPKPPKRPRLQRPASTTVLSPSPPVQQPQFTV |
| | | ISPITITPVGQSFSMGNIPVA |
| 1139 | RNF213 | LPRGLQVGQPNLVVCGHSEVLPAALAVYMQTPSQPLPTY |
| | | DEVLLCTPATTFEEVALLLRRCL |
| 1140 | IFI16_0 | ALSRKRKKEVDATSPAPSTSSTVKTEGAEATPGAQNPKTV |
| | | AKCQVTPRRNVLQKRPVIVKVL |
| 1141 | IFI16_1 | LKEGSHFPGPFMTSIGPAESHPHTPQMPPSTPSSSFLTTLKP |
| | | RLKTEPEEVSIEDSAQSDLK |
| 1142 | KDM2A_0 | KAQKRKMEESDEEAVQAKVLRPLRSCDEPLTPPPHSPTSM |
| | | LQLIHDPVSPRGMVTRSSPGAG |
| 1143 | KDM2A_1 | KMEESDEEAVQAKVLRPLRSCDEPLTPPPHSPTSMLQLIHD |
| | | PVSPRGMVTRSSPGAGPSDHH |
| 1144 | NRK | ASAILYAGFVEVPEESPKQPSEVNVNPLYVSPACKKPLIHM |
| | | YEKEFTSEICCGSLWGVNLLL |
| 1145 | CGNL1 | SNWLKTLTEEGINNKKPWTCFPKPSNSQPTSPSLEDPAKSG |
| | | VTAIRLCSSVVIEDPKKQTSV |
| 1146 | DMTN | STSPPPSPEVWADSRSPGIISQASAPRTTGTPRTSLPHFHHP |
| | | ETSRPDSNIYKKPPIYKQRE |
| 1147 | PABPC4 | TAVQNLAPRAAVAAAAPRAVAPYKYASSVRSPHPAIQPL |
| | | QAPQPAVHVQGQEPLTASMLAAA |
| 1148 | E2F1_0 | AAQDASAPPAPTGPAAPAAGPCDPDLLLFATPQAPRPTPS |
| | | APRPALGRPPVKRRLDLETDHQ |
| 1149 | E2F1_1 | PPAPTGPAAPAAGPCDPDLLLFATPQAPRPTPSAPRPALGR |
| | | PPVKRRLDLETDHQYLAESSG |
| 1150 | KPRP | GASCPELRPHVEPRPLPSFCPPRRLDQCPESPLQRCPPPAPR |
| | | PRLRPEPCISLEPRPRPLPR |
| 1151 | AGER | EEVQLVVEPEGGAVAPGGTVTLTCEVPAQPSPQIHWMKD |
| | | GVPLPLPPSPVLILPEIGPQDQG |
| 1152 | SIK3 | AAGAGTGGAGPAGRLLPPPAPGSPAAPAAVSPAAGQPRPP |
| | | APASRGPMPARIGYYEIDRTIG |
| 1153 | TAF4B | GETSGAAICLPSVKPVVSSAGTTSDKPVIGTPVQIKLAQPG |
| | | PVLSQPAGIPQAVQVKQLVVQ |
| 1154 | AKNA | PIMPYPPAAVYYAPAGPTSAQPAAKWPPTASPPPARRHRH |
| | | SIQLDLGDLEELNKALSRAVQA |
| 1155 | NUP62 | STAQPSGFNIGSAGNSAQPTAPATLPFTPATPAATTAGATQ |
| | | PAAPTPTATITSTGPSLFASI |
| 1156 | ARHGAP33_0 | RAGGGGRDAPEAAAQSPCSVPSQVPTPGFFSPAPRECLPPF |
| | | LGVPKPGLYPLGPPSFQPSSP |
| 1157 | ARHGAP33_1 | TRSWSPFRSMPPDRLNASYGMLGQSPPLHRSPDFLLSYPP |
| | | APSCFPPDHLGYSAPQHPARRP |
| 1158 | ARHGAP33_2 | PARRPTPPEPLYVNLALGPRGPSPASSSSSSPPAHPRSRSDP |
| | | GPPVPRLPQKQRAPWGPRTP |
| 1159 | TEAD2 | DVKPFSQTPFTLSLTPPSTDLPGYEPPQALSPLPPPTPSPPA |
| | | WQARGLGTARLQLVEFSAFV |
| 1160 | TP53BP1_0 | EEGGEPFQKKLQSGEPVELENPPLLPESTVSPQASTPISQST |
| | | PVFPPGSLPIPSQPQFSHDI |
| 1161 | TP53BP1_1 | PFQKKLQSGEPVELENPPLLPESTVSPQASTPISQSTPVFPP |
| | | GSLPIPSQPQFSHDIFIPSP |
| 1162 | PPP1R13B_0 | LERRKEGSLPRPSAGLPSRQRPTLLPATGSTPQPGSSQQIQQ |
| | | RISVPPSPTYPPAGPPAFPA |
| 1163 | PPP1R13B_1 | PSESTEKEPEQDGPAAPADGSTVESLPRPLSPTKLTPIVHSP |
| | | LRYQSDADLEALRRKLANAP |
| 1164 | PPP1R13B_2 | EKEPEQDGPAAPADGSTVESLPRPLSPTKLTPIVHSPLRYQ |
| | | SDADLEALRRKLANAPRPLKK |
| 1165 | PPP1R13B_3 | QDGPAAPADGSTVESLPRPLSPTKLTPIVHSPLRYQSDADL |
| | | EALRRKLANAPRPLKKRSSIT |
| 1166 | EML3_0 | QEMELVKAALAEALRLLRLQVPPSSLQGSGTPAPPGDSLA |
| | | APPGLPPTCTPSLVSRGTQTET |
| 1167 | EML3_1 | SEGGGSSSSGAGSPGPPGILRPLQPPQRADTPRRNSSSSSSP |
| | | SERPRQKLSRKAISSANLLV |
| 1168 | ZDHHC8 | SLSYDSLLNPGSPGGHACPAHPAVGVAGYHSPYLHPGAT |
| | | GDPPRPLPRSFSPVLGPRPREPS |
| 1169 | HIF3A | QLNASEQLPRAYHRPLGAVPRPRARSFHGLSPPALEPSLLP |
| | | RWGSDPRLSCSSPSRGDPSAS |
| 1170 | ZNF385A_0 | ARRVKGIEAAKTRGREPGVREPGDPAPPGSTPTNGDGVAP |
| | | RPVSMENGLGPAPGSPEKQPGS |
| 1171 | ZNF385A_1 | TFSKELPKSLAGGLLPSPLAVAAVMAAAAGSPLSLRPAPA |
| | | APLLQGPPITHPLLHPAPGPIR |
| 1172 | VASN_0 | ATTTTATVPTTRPVVREPTALSSSLAPTWLSPTEPATEAPSP |
| | | PSTAPPTVGPVPQPQDCPPS |
| 1173 | VASN_1 | TRPVVREPTALSSSLAPTWLSPTEPATEAPSPPSTAPPTVGP |
| | | VPQPQDCPPSTCLNGGTCHL |
| 1174 | MYRF_0 | CFPDISAPASSASYSHGQPAMPGSSGVHHLSPPGGGPSPGR |
| | | HGPLPPPGYGTPLNCNNNNGM |
| 1175 | MYRF_1 | PTRAPSPPWPPQGPLSPGPGSLPLSIARVQTPPWHPPGAPSP |
| | | GLLQDSDSLSGSYLDPNYQS |
| 1176 | MAP2K7 | RRRIDLNLDISPQRPRPTLQLPLANDGGSRSPSSESSPQHPT |
| | | PPARPRHMLGLPSTLFTPRS |
| 1177 | RORC | VVKTPPAGAQGADTLTYTLGLPDGQLPLGSSPDLPEASAC |
| | | PPGLLKASGSGPSYSNNLAKAG |
| 1178 | TRERF1 | SQLRSPRVLGDHLLLDPTHELPPYTPPPMLSPVRQGSGLFS |
| | | NVLISGHGPGAHPQLPLTPLT |
| 1179 | EIF4B | TSTTSSRNARRRESEKSLENETLNKEEDCHSPTSKPPKPDQ |
| | | PLKVMPAPPPKENAWVKRSSN |
| 1180 | MAP7D1_0 | RAGASLARGPQPDRTHPSAAVPVCPRSASASPLTPCSVTRS |
| | | VHRCAPAGERGERRKPNAGGS |
| 1181 | MAP7D1_1 | GPEDKSQSKRRASNEKESAAPASPAPSPAPSPTPAPPQKEQ |
| | | PPAETPTDAAVLTSPPAPAPP |
| 1182 | MAP7D1_2 | KESAAPASPAPSPAPSPTPAPPQKEQPPAETPTDAAVLTSPP |
| | | APAPPVTPSKPMAGTTDREE |
| 1183 | RAB11FIP5_0 | ASPHHSSSGEEKAKSSWFGLREAKDPTQKPSPHPVKPLSA |
| | | APVEGSPDRKQSRSSLSIALSS |
| 1184 | RAB11FIP5_1 | SWFGLREAKDPTQKPSPHPVKPLSAAPVEGSPDRKQSRSS |
| | | LSIALSSGLEKLKTVTSGSIQP |
| 1185 | RAD54L2 | LSEPRMFAPFPSPVLPSNLSRGMSIYPGYMSPHAGYPAGGL |
| | | LRSQVPPFDSHEVAEVGFSSN |
| 1186 | LZTS2 | CPSGTLSDSGRNSLSSLPTYSTGGAEPTTSSPGGHLPSHGS |
| | | GRGALPGPARGVPTGPSHSDS |
| 1187 | SH3BP1_0 | SGSPGTPQALPRRLVGSSLRAPTVPPPLPPTPPQPARRQSRR |
| | | SPASPSPASPGPASPSPVSL |
| 1188 | SH3BP1_1 | RLVGSSLRAPTVPPPLPPTPPQPARRQSRRSPASPSPASPGP |
| | | ASPSPVSLSNPAQVDLGAAT |
| 1189 | SH3BP1_2 | GSSLRAPTVPPPLPPTPPQPARRQSRRSPASPSPASPGPASPS |
| | | PVSLSNPAQVDLGAATAEG |
| 1190 | SH3BP1_3 | SLRAPTVPPPLPPTPPQPARRQSRRSPASPSPASPGPASPSPV |
| | | SLSNPAQVDLGAATAEGGA |
| 1191 | SH3BP1_4 | LPPTPPQPARRQSRRSPASPSPASPGPASPSPVSLSNPAQVD |
| | | LGAATAEGGAPEAISGVPTP |
| 1192 | L3MBTL1 | DHPDIHPAGWCSKTGHPLQPPLGPREPSSASPGGCPPLSYR |
| | | SLPHTRTSKYSFHHRKCPTPG |
| 1193 | NBEAL2_0 | ARQAGWQDVLTRLYVLEAATAGSPPPSSPESPTSPKPAPP |
| | | KPPTESPAEPSDVFLPSEAPCP |
| 1194 | NBEAL2_1 | AGWQDVLTRLYVLEAATAGSPPPSSPESPTSPKPAPPKPPT |
| | | ESPAEPSDVFLPSEAPCPDPD |
| 1195 | NBEAL2_2 | LEAATAGSPPPSSPESPTSPKPAPPKPPTESPAEPSDVFLPSE |
| | | APCPDPDGFYHALSPFCTP |
| 1196 | TP53 | EQWFTEDPGPDEAPRMPEAAPPVAPAPAAPTPAAPAPAPS |
| | | WPLSSSVPSQKTYQGSYGFRLG |
| 1197 | RGL3 | LSAKLAREKSSSPSGSPGDPSSPTSSVSPGSPPSSPRSRDAP |
| | | AGSPPASPGPQGPSTKLPLS |
| 1198 | PRG4_0 | TPKAETTTKGPALTTPKEPTPTTPKEPASTTPKEPTPTTIKS |
| | | APTTPKEPAPTTTKSAPTTP |
| 1199 | PRG4_1 | TTTKGPALTTPKEPTPTTPKEPASTTPKEPTPTTIKSAPTTPK |
| | | EPAPTTTKSAPTTPKEPAP |
| 1200 | PRG4_2 | PKEPTPTTPKEPASTTPKEPTPTTIKSAPTTPKEPAPTTTKSA |
| | | PTTPKEPAPTTTKEPAPTT |
| 1201 | PRG4_3 | TPKEPTPTTIKSAPTTPKEPAPTTTKSAPTTPKEPAPTTTKEP |
| | | APTTPKEPAPTTTKEPAPT |
| 1202 | PRG4_4 | TTPKEPAPTTPKKPAPTTPKEPAPTTPKEPTPTTPKEPAPTT |
| | | KEPAPTTPKEPAPTAPKKPA |
| 1203 | PRG4_5 | KEPAPTTPKKPAPTTPKEPAPTTPKEPTPTTPKEPAPTTKEP |
| | | APTTPKEPAPTAPKKPAPTT |
| 1204 | PRG4_6 | PKEPAPTTPKEPTPTTPKEPAPTTKEPAPTTPKEPAPTAPKK |
| | | PAPTTPKEPAPTTPKEPAPT |
| 1205 | PRG4_7 | KEPAPTTPKETAPTTPKGTAPTTLKEPAPTTPKKPAPKELA |
| | | PTTTKEPTSTTSDKPAPTTPK |
| 1206 | PRG4_8 | KEPAPTTPKEPAPTTPKGTAPTTLKEPAPTTPKKPAPKELA |
| | | PTTTKGPTSTTSDKPAPTTPK |
| 1207 | NHS | AGLASPSSGYSSQSETPTSSFPTAFFSGPLSPGGSKRKPKVP |
| | | ERKSSLQQPSLKDGTISLSK |
| 1208 | TNK2_0 | SAQTAEIFQALQQECMRQLQAPAGSPAPSPSPGGDDKPQV |
| | | PPRVPIPPRPTRPHVQLSPAPP |
| 1209 | TNK2_1 | PIPPRPTRPHVQLSPAPPGEEETSQWPGPASPPRVPPREPLS |
| | | PQGSRTPSPLVPPGSSPLPP |
| 1210 | TNK2_2 | STHYYLLPERPSYLERYQRFLREAQSPEEPTPLPVPLLLPPP |
| | | STPAPAAPTATVRPMPQAAL |
| 1211 | TNK2_3 | LERYQRFLREAQSPEEPTPLPVPLLLPPPSTPAPAAPTATVR |
| | | PMPQAALDPKANFSTNNSNP |
| 1212 | KMT2D_0 | KPLGKAGVQLEPQLEAPLNEEMPLLPPPEESPLSPPPEESPT |
| | | SPPPEASRLSPPPEELPASP |
| 1213 | KMT2D_1 | LEPQLEAPLNEEMPLLPPPEESPLSPPPEESPTSPPPEASRLS |
| | | PPPEELPASPLPEALHLSR |
| 1214 | KMT2D_2 | PEASRLSPPPEELPASPLPEALHLSRPLEESPLSPPPEESPLSP |
| | | PPESSPFSPLEESPLSPP |
| 1215 | KMT2D_3 | PESSPFSPLEESPLSPPEESPPSPALETPLSPPPEASPLSPPFEE |
| | | SPLSPPPEELPTSPPPE |
| 1216 | KMT2D_4 | PPEESPPSPALETPLSPPPEASPLSPPFEESPLSPPPEELPTSPP |
| | | PEASRLSPPPEESPMSP |
| 1217 | KMT2D_5 | FEESPLSPPPEELPTSPPPEASRLSPPPEESPMSPPPEESPMSP |
| | | PPEASRLFPPFEESPLSP |
| 1218 | KMT2D_6 | PEELPTSPPPEASRLSPPPEESPMSPPPEESPMSPPPEASRLFP |
| | | PFEESPLSPPPEESPLSP |
| 1219 | KMT2D_7 | PEESPMSPPPEESPMSPPPEASRLFPPFEESPLSPPPEESPLSP |
| | | PPEASRLSPPPEDSPMSP |
| 1220 | KMT2D_8 | PEESPMSPPPEASRLFPPFEESPLSPPPEESPLSPPPEASRLSP |
| | | PPEDSPMSPPPEESPMSP |
| 1221 | KMT2D_9 | FEESPLSPPPEESPLSPPPEASRLSPPPEDSPMSPPPEESPMSP |
| | | PPEVSRLSPLPVVSRLSP |
| 1222 | KMT2D_10 | PEESPLSPPPEASRLSPPPEDSPMSPPPEESPMSPPPEVSRLSP |
| | | LPVVSRLSPPPEESPLSP |
| 1223 | KMT2D_11 | PEESPMSPPPEVSRLSPLPVVSRLSPPPEESPLSPPPEESPTSP |
| | | PPEASRLSPPPEDSPTSP |
| 1224 | KMT2D_12 | PEVSRLSPLPVVSRLSPPPEESPLSPPPEESPTSPPPEASRLSP |
| | | PPEDSPTSPPPEDSPASP |
| 1225 | KMT2D_13 | PEESPLSPPPEESPTSPPPEASRLSPPPEDSPTSPPPEDSPASPP |
| | | PEDSLMSLPLEESPLLP |
| 1226 | KMT2D_14 | PEESPTSPPPEASRLSPPPEDSPTSPPPEDSPASPPPEDSLMSL |
| | | PLEESPLLPLPEEPQLCP |
| 1227 | KMT2D_15 | PEDSPTSPPPEDSPASPPPEDSLMSLPLEESPLLPLPEEPQLC |
| | | PRSEGPHLSPRPEEPHLSP |
| 1228 | KMT2D_16 | GEPALSEPGEPPLSPLPEELPLSPSGEPSLSPQLMPPDPLPPP |
| | | LSPIITAAAPPALSPLGEL |
| 1229 | KMT2D_17 | ILETPISPPPEANCTDPEPVPPMILPPSPGSPVGPASPILMEPL |
| | | PPQCSPLLQHSLVPQNSP |
| 1230 | KMT2D_18 | SPILMEPLPPQCSPLLQHSLVPQNSPPSQCSPPALPLSVPSPL |
| | | SPIGKVVGVSDEAELHEME |
| 1231 | KMT2D_19 | DTAPLDGIDAPGSQPEPGQTPGSLASELKGSPVLLDPEELA |
| | | PVTPMEVYPECKQTAGQGSPC |
| 1232 | KMT2D_20 | CALPPRSLPSDPFSRVPASPQSQSSSQSPLTPRPLSAEAFCPS |
| | | PVTPRFQSPDPYSRPPSRP |
| 1233 | KMT2D_21 | FSRVPASPQSQSSSQSPLTPRPLSAEAFCPSPVTPRFQSPDP |
| | | YSRPPSRPQSRDPFAPLHKP |
| 1234 | KMT2D_22 | VPASPQSQSSSQSPLTPRPLSAEAFCPSPVTPRFQSPDPYSR |
| | | PPSRPQSRDPFAPLHKPPRP |
| 1235 | KMT2D_23 | QSQSSSQSPLTPRPLSAEAFCPSPVTPRFQSPDPYSRPPSRPQ |
| | | SRDPFAPLHKPPRPQPPEV |
| 1236 | KMT2D_24 | GAGPRPQGPPRLPAPPGALSTGPVLGPVHPTPPPSSPQEPK |
| | | RPSQLPSPSSQLPTEAQLPPT |
| 1237 | KMT2D_25 | PQGPPRLPAPPGALSTGPVLGPVHPTPPPSSPQEPKRPSQLP |
| | | SPSSQLPTEAQLPPTHPGTP |
| 1238 | KMT2D_26 | ALSTGPVLGPVHPTPPPSSPQEPKRPSQLPSPSSQLPTEAQL |
| | | PPTHPGTPKPQGPTLEPPPG |
| 1239 | KMT2D_27 | YTYNVSNLDVRQLSAPPPEEPSPPPSPLAPSPASPPTEPLVE |
| | | LPTEPLAEPPVPSPLPLASS |
| 1240 | ARHGAP32 | RFYSGDQPPSYLGASVDKLHHPLEFADKSPTPPNLPSDKIY |
| | | PPSGSPEENTSTATMTYMTTT |
| 1241 | ZNF652_0 | EKPYPCDVCGQRFRFSNMLKAHKEKCFRVTSPVNVPPAV |
| | | QIPLTTSPATPVPSVVNTATTPT |
| 1242 | ZNF652_1 | SNMLKAHKEKCFRVTSPVNVPPAVQIPLTTSPATPVPSVV |
| | | NTATTPTPPINMNPVSTLPPRP |
| 1243 | TNS2_0 | SYGGAVPSYCPAYGRVPHSCGSPGEGRGYPSPGAHSPRAG |
| | | SISPGSPPYPQSRKLSYEIPTE |
| 1244 | TNS2_1 | ASSELSGPSTPLHTSSPVQGKESTRRQDTRSPTSAPTQRLSP |
| | | GEALPPVSQAGTGKAPELPS |
| 1245 | TNS2_2 | PGEALPPVSQAGTGKAPELPSGSGPEPLAPSPVSPTFPPSSP |
| | | SDWPQERSPGGHSDGASPRS |
| 1246 | TNS2_3 | ALPPVSQAGTGKAPELPSGSGPEPLAPSPVSPTFPPSSPSDW |
| | | PQERSPGGHSDGASPRSPVP |
| 1247 | TNS2_4 | SPRSPVPTTLPGLRHAPWQGPRGPPDSPDGSPLTPVPSQMP |
| | | WLVASPEPPQSSPTPAFPLAA |
| 1248 | TNS2_5 | SLSALVSQHSISPISLPCCLRIPSKDPLEETPEAPVPTNMSTA |
| | | ADLLRQGAACSVLYLTSVE |
| 1249 | ARHGAP27_0 | LPSPVWETHTDAGTGRPYYYNPDTGVTTWESPFEAAEGA |
| | | ASPATSPASVDSHVSLETEWGQY |
| 1250 | ARHGAP27_1 | WEDEAENEPEEELEMQPGLSPGSPGDPRPPTPETDYPESLT |
| | | SYPEEDYSPVGSFGEPGPTSP |
| 1251 | FOXL1 | RSAEAQPEAGSGAGGSGPAISRLQAAPAGPSPLLDGPSPPA |
| | | PLHWPGTASPNEDAGDAAQGA |
| 1252 | TMEM132E | GPGGGEDEARGAGPPGSALPAPEAPGPGTASPVVPPTEDF |
| | | LPLPTGFLQVPRGLTDLEIGMY |
| 1253 | SOS1 | DYLFNKSLEIEPRNPKPLPRFPKKYSYPLKSPGVRPSNPRPG |
| | | TMRHPTPLQQEPRKISYSRI |
| 1254 | CRAMP1 | PSPRPGPGLLLDVCTKDLADAPAEELQEKGSPAGPPPSQG |
| | | QPAARPPKEVPASRLAQQLREE |
| 1255 | PIAS1 | EEPSAKRTCPSLSPTSPLNNKGILSLPHQASPVSRTPSLPAV |
| | | DTSYINTSLIQDYRHPFHMT |
| 1256 | PPP1R15B | AGDIPGNTQESTEEKIELLTTEVPLALEEESPSEGCPSSEIPM |
| | | EKEPGEGRISVVDYSYLEG |
| 1257 | JPH2_0 | LQEILENSESLLEPPDRGAGAAGLPQPPRESPQLHERETPRP |
| | | EGGSPSPAGTPPQPKRPRPG |
| 1258 | JPH2_1 | EVSGSESAPSSPATAPLQAPTLRGPEPARETPAKLEPKPIIP |
| | | KAEPRAKARKTEARGLTKAG |
| 1259 | PPFIBP2 | EEPEGGFSKWNATNKDPEELFKQEMPPRCSSPTVGPPPLP |
| | | QKSLETRAQKKLSCSLEDLRSE |
| 1260 | LPP_0 | IDSLTSILADLECSSPYKPRPPQSSTGSTASPPVSTPVTGHK |
| | | RMVIPNQPPLTATKKSTLKP |
| 1261 | LPP_1 | SILADLECSSPYKPRPPQSSTGSTASPPVSTPVTGHKRMVIP |
| | | NQPPLTATKKSTLKPQPAPQ |
| 1262 | PMEL | QAVPSGEGDAFELTVSCQGGLPKEACMEISSPGCQPPAQR |
| | | LCQPVLPSPACQLVLHQILKGG |
| 1263 | ITSN2 | SIAMKLIKLKLQGQQLPVVLPPIMKQPPMFSPLISARFGMG |
| | | SMPNLSIPQPLPPAAPITSLS |
| 1264 | CSTF2 | EVRGMEARGMDTRGPVPGPRGPIPSGMQGPSPINMGAVV |
| | | PQGSRQVPVMQGTGMQGASIQGG |
| 1265 | BCL9L_0 | LTISINQMGSPGMGHLKSPTLSQVHSPLVTSPSANLKSPQT |
| | | PSQMVPLPSANPPGPLKSPQV |
| 1266 | BCL9L_1 | PGMGHLKSPTLSQVHSPLVTSPSANLKSPQTPSQMVPLPSA |
| | | NPPGPLKSPQVLGSSLSVRSP |
| 1267 | ZNF142 | SFKQQRGLSTHLLKKCPVLLRKNKGLPRPDSPIPLQPVLPG |
| | | TQASEDTESGKPPPASQEAEL |
| 1268 | MED13L_0 | LNTPQMNTPVTLNSAAPASNSGAGVLPSPATPRFSVPTPRT |
| | | PRTPRTPRGGGTASGQGSVKY |
| 1269 | MED13L_1 | TLNSAAPASNSGAGVLPSPATPRFSVPTPRTPRTPRTPRGG |
| | | GTASGQGSVKYDSTDQGSPAS |
| 1270 | MED13L_2 | LYAQVCRHHLAPYLATLQLDSSLLIPPKYQTPPAAAQGQA |
| | | TPGNAGPLAPNGSAAPPAGSAF |
| 1271 | MED13L_3 | APYLATLQLDSSLLIPPKYQTPPAAAQGQATPGNAGPLAP |
| | | NGSAAPPAGSAFNPTSNSSSTN |
| 1272 | MASTL | PNQIKSGTPYRTPKSVRRGVAPVDDGRILGTPDYLAPELLL |
| | | GRAHGPAVDWWALGVCLFEFL |
| 1273 | SAMD11 | QGLAQHREGAAPAAAPSFSERELPQPPPLLSPQNAPHVAL |
| | | GPHLRPPFLGVPSALCQTPGYG |
| 1274 | BCORL1 | APVPTPVLAPMPASTPPAAPAPPSVPMPTPTPSSGPPSTPTL |
| | | IPAFAPTPVPAPTPAPIFTP |
| 1275 | SETD1B_0 | RTKLLFLREPDSDTELQMEGSPISSSSSQLSPLAPFGTNSQP |
| | | GFRGPTPPSSRPSSTGLEDI |
| 1276 | SETD1B_1 | HDLEVEPEPPMMLPLPLQPPLPPPRPPRPPSPPPEPETTDAS |
| | | HPSVPPEPLAEDHPPHTPGL |
| 1277 | SETD1B_2 | TEEYMELAKSRGPWRRPPKKRHEDLVPPAGSPELSPPQPL |
| | | FRPRSEFEEMTILYDIWNGGID |
| 1278 | ZCCHC8 | GSQSSESFQFQPPLPPDTPPLPRGTPPPVFTPPLPKGTPPLTP |
| | | SDSPQTRTASGAVDEDALT |
| 1279 | IKBKG | RKRHVEVSQAPLPPAPAYLSSPLALPSQRRSPPEEPPDFCCP |
| | | KCQYQAPDMDTLQIHVMECI |
| 1280 | LAS1L | ARRGWRLFNCSASLDWPRMVESCLGSPCWASPQLLRIIFK |
| | | AMGQGLPDEEQEKLLRICSIYT |
| 1281 | PDZD4_0 | PEKSDKDSTSAYNTGESCRSTPLLVEPLPESPLRRAMAGNS |
| | | NLNRTPPGPAVATPAKAAPPP |
| 1282 | PDZD4_1 | LVEPLPESPLRRAMAGNSNLNRTPPGPAVATPAKAAPPPG |
| | | SPAKFRSLSRDPEAGRRQHAEE |
| 1283 | PDZD4_2 | RRAMAGNSNLNRTPPGPAVATPAKAAPPPGSPAKFRSLSR |
| | | DPEAGRRQHAEERGRRNPKTGL |
| 1284 | ZNF106 | SAASFEVVRQCPTAEKPEQEHTPNKMPSLKSPLLPCPATKS |
| | | LSQKQDPKNISKNTKTNFFSP |
| 1285 | HNF1A | EEAFRHKLAMDTYSGPPPGPGPGPALPAHSSPGLPPPALSP |
| | | SKVHGVRYGQPATSETAEVPS |
| 1286 | CLASP2 | NTGNGTQSSMGSPLTRPTPRSPANWSSPLTSPTNTSQNTLS |
| | | PSAFDYDTENMNSEDIYSSLR |
| 1287 | KMT2B_0 | PVVSARSSRVIKTPRRFMDEDPPKPPKVEVSPVLRPPITTSP |
| | | PVPQEPAPVPSPPRAPTPPS |
| 1288 | KMT2B_1 | IKTPRRFMDEDPPKPPKVEVSPVLRPPITTSPPVPQEPAPVP |
| | | SPPRAPTPPSTPVPLPEKRR |
| 1289 | KMT2B_2 | EVSPVLRPPITTSPPVPQEPAPVPSPPRAPTPPSTPVPLPEKR |
| | | RSILREPTFRWTSLTRELP |
| 1290 | CIC_0 | PLVSPPFSVPVQNGAQPPSKIIQLTPVPVSTPSGLVPPLSPAT |
| | | LPGPTSQPQKVLLPSSTRI |
| 1291 | CIC_1 | PTAPESELEGQPTPPAPPPLPETWTPTARSSPPLPPPAEERTS |
| | | AKGPETMASKFPSSSSDWR |
| 1292 | CIC_2 | FQARYADIFPSKVCLQLKIREVRQKIMQAATPTEQPPGAE |
| | | APLPVPPPTGTAAAPAPTPSPA |
| 1293 | DCTN1_0 | GPSGSASAGELSSSEPSTPAQTPLAAPIIPTPVLTSPGAVPPL |
| | | PSPSKEEEGLRAQVRDLEE |
| 1294 | DCTN1_1 | ASAGELSSSEPSTPAQTPLAAPIIPTPVLTSPGAVPPLPSPSK |
| | | EEEGLRAQVRDLEEKLETL |
| 1295 | EPN1_0 | PWGGPAPTPASGDPWRPAAPAGPSVDPWGGTPAPAAGEG |
| | | PTPDPWGSSDGGVPVSGPSASDP |
| 1296 | EPN1_1 | SGDPWRPAAPAGPSVDPWGGTPAPAAGEGPTPDPWGSSD |
| | | GGVPVSGPSASDPWTPAPAFSDP |
| 1297 | EPN1_2 | GSSDGGVPVSGPSASDPWTPAPAFSDPWGGSPAKPSTNGT |
| | | TAAGGFDTEPDEFSDFDRLRTA |
| 1298 | EPN1_3 | EVPARSPGAFDMSGVRGSLAEAVGSPPPAATPTPTPPTRKT |
| | | PESFLGPNAALVDLDSLVSRP |
| 1299 | EPN1_4 | DMSGVRGSLAEAVGSPPPAATPTPTPPTRKTPESFLGPNAA |
| | | LVDLDSLVSRPGPTPPGAKAS |
| 1300 | CEBPE | TAMHLPPTLAAPGQPLRVLKAPLATAAPPCSPLLKAPSPA |
| | | GPLHKGKKAVNKDSLEYRLRRE |
| 1301 | RFX4 | MKGEGSTAEVREEIILTEAAAPTPSPVPSFSPAKSATSVEVP |
| | | PPSSPVSNPSPEYTGLSTTG |
| 1302 | LPIN3 | PLGLPIQQTEAGADLQPDTEDPTLVGPPLHTPETEESKTQS |
| | | SGDMGLPPASKSWSWATLEVP |
| 1303 | RAPGEF1 | SQSTELLPDATDEEVAPPKPPLPGIRVVDNSPPPALPPKKR |
| | | QSAPSPTRVAVVAPMSRATSG |
| 1304 | SAMD4A | AYSSPSTTPEARRREPQAPRQPSLMGPESQSPDCKDGAAA |
| | | TGATATPSAGASGGLQPHQLSS |
| 1305 | MAST4_0 | NPQQREGSSPKHQDHTTDPKLLTCLGQNLHSPDLARPRCP |
| | | LPPEASPSREKPGLRESSERGP |
| 1306 | MAST4_1 | TTDPKLLTCLGQNLHSPDLARPRCPLPPEASPSREKPGLRE |
| | | SSERGPPTARSERSAARADTC |
| 1307 | PRRC2C | QTHKPVQNPLQTTSQSSKQPPPSIRLPSAQTPNGTDYVASG |
| | | KSIQTPQSHGTLTAELWDNKV |
| 1308 | PROP1 | MEAERRRQAEKPKKGRVGSNLLPERHPATGTPTTTVDSSA |
| | | PPCRRLPGAGGGRSRFSPQGGQ |
| 1309 | ARMC5_0 | RAQGGSFRSLRSWLISEGYATGPDDISPDWSPEQCPPEPME |
| | | PASPAPTPTSLRAPRTQRTPG |
| 1310 | ARMC5_1 | ADSLSCLQDLVSPTVSPAVPQAVPMDLDSPSPCLYEPLLGP |
| | | APVPAPDLHFLLDSGLQLPAQ |
| 1311 | CRYBG1_0 | SSPTKRKGRSRALEAVPAPPASGPRAPAKESPPKRVPDPSP |
| | | VTKGTAAESGEEAARAIPREL |
| 1312 | CRYBG1_1 | PTTVDTKDLPPTAMPKPQHTFSDSQSPAESSPGPSLSLSAP |
| | | APGDVPKDTCVQSPISSFPCT |
| 1313 | DLAT_0 | IIVEKEADISAFADYRPTEVTDLKPQVPPPTPPPVAAVPPTP |
| | | QPLAPTPSAPCPATPAGPKG |
| 1314 | DLAT_1 | AFADYRPTEVTDLKPQVPPPTPPPVAAVPPTPQPLAPTPSA |
| | | PCPATPAGPKGRVFVSPLAKK |
| 1315 | DLAT_2 | TEVTDLKPQVPPPTPPPVAAVPPTPQPLAPTPSAPCPATPA |
| | | GPKGRVFVSPLAKKLAVEKGI |
| 1316 | DLAT_3 | QVPPPTPPPVAAVPPTPQPLAPTPSAPCPATPAGPKGRVFV |
| | | SPLAKKLAVEKGIDLTQVKGT |
| 1317 | DENND2B_0 | ACRYPSHSSSRVLLKDRHPPAPSPQNPQDPSPDTSPPTCPF |
| | | KTASFGYLDRSPSACKRDAQK |
| 1318 | DENND2B_1 | NPVPKPKRTFEYEADKNPKSKPSNGLPPSPTPAAPPPLPSTP |
| | | APPVTRRPKKDMRGHRKSQS |
| 1319 | DENND2B_2 | EYEADKNPKSKPSNGLPPSPTPAAPPPLPSTPAPPVTRRPK |
| | | KDMRGHRKSQSRKSFEFEDAS |
| 1320 | PCDH12 | CEVGQSHKDVDKEAMMEAGWDPCLQAPFHLTPTLYRTL |
| | | RNQGNQGAPAESREVLQDTVNLLF |
| 1321 | SCARF2_0 | HTVEHGSPRTRDPTPRPPGLPEEATALAAPSPPRARARGRG |
| | | PGLLEPTDAGGPPRSAPEAAS |
| 1322 | SCARF2_1 | LGRAEVALGAQGPREKPAPPQKAKRSVPPASPARAPPATE |
| | | TPGPEKAATDLPAPETPRKKTP |
| 1323 | SCARF2_2 | QGPREKPAPPQKAKRSVPPASPARAPPATETPGPEKAATD |
| | | LPAPETPRKKTPIQKPPRKKSR |
| 1324 | IRAG1 | PGTRGHSQQEAAMPHIPEDEEPPGEPQAAQSPAGQGPPAA |
| | | GVSCSPTPTIVLTGDATSPEGE |
| 1325 | CAMSAP3_0 | SLASPYLPEGTSKPLSDRPTKAPVYMPHPETPSKPSPCLVG |
| | | EASKPPAPSEGSPKAVASSPA |
| 1326 | CAMSAP3_1 | YLPEGTSKPLSDRPTKAPVYMPHPETPSKPSPCLVGEASKP |
| | | PAPSEGSPKAVASSPAATNSE |
| 1327 | SP110_0 | QPPQPSCSPCAPRVSEPGTSSQQSDEILSESPSPSDPVLPLPA |
| | | LIQEGRSTSVTNDKLTSKM |
| 1328 | SP110_1 | DNLIPQIRDKEDPQEMPHSPLGSMPEIRDNSPEPNDPEEPQE |
| | | VSSTPSDKKGKKRKRCIWST |
| 1329 | COL6A2 | QKGKLGRIGPPGCKGDPGNRGPDGYPGEAGSPGERGDQG |
| | | GKGDPGRPGRRGPPGEIGAKGSK |
| 1330 | POLR1G | TCASAPQGTLRILEGPQQSLSGSPLQPIPASPPPQIPPGLRPR |
| | | FCAFGGNPPVTGPRSALAP |
| 1331 | USP54 | CSSSSSLPVIHDPSVFLLGPQLYLPQPQFLSPDVLMPTMAG |
| | | EPNRLPGTSRSVQQFLAMCDR |
| 1332 | FILIP1L | HTPGQPLHIKVTPDHVQNTATLEITSPTTESPHSYTSTAVIP |
| | | NCGTPKQRITILQNASITPV |
| 1333 | LITAF | GPYQAATGPSSAPSAPPSYEETVAVNSYYPTPPAPMPGPTT |
| | | GLVTGPDGKGMNPPSYYTQPA |
| 1334 | GLIS3 | HNPSSQLPPLTAVDAGAERFAPSAPSPHHISPRRVPAPSSIL |
| | | QRTQPPYTQQPSGSHLKSYQ |
| 1335 | CPLANE1 | ISQAYGLMNELLSESVQLPTLPQKPLPNKPSPTQSSSCQHC |
| | | PSPRGENQHGHSFLINRPGKV |
| 1336 | CNOT2_0 | ALGLPMRGMSNNTPQLNRSLSQGTQLPSHVTPTTGVPTMS |
| | | LHTPPSPSRGILPMNPRNMMNH |
| 1337 | CNOT2_1 | LTFIRAAETDPGMVHLALGSDLTTLGLNLNSPENLYPKFA |
| | | SPWASSPCRPQDIDFHVPSEYL |
| 1338 | CNOT2_2 | PGMVHLALGSDLTTLGLNLNSPENLYPKFASPWASSPCRP |
| | | QDIDFHVPSEYLTNIHIRDKLA |
| 1339 | CNOT2_3 | LALGSDLTTLGLNLNSPENLYPKFASPWASSPCRPQDIDFH |
| | | VPSEYLTNIHIRDKLAAIKLG |
| 1340 | USP19_0 | LRKRQSQRWGGLEAPAARVGGAKVAVPTGPTPLDSTPPG |
| | | GAPHPLTGQEEARAVEKDKSKAR |
| 1341 | USP19_1 | SQRWGGLEAPAARVGGAKVAVPTGPTPLDSTPPGGAPHP |
| | | LTGQEEARAVEKDKSKARSEDTG |
| 1342 | CNTFR | EFTIVKPDPPENVVARPVPSNPRRLEVTWQTPSTWPDPESF |
| | | PLKFFLRYRPLILDQWQHVEL |
| 1343 | MYO19 | QARYMADTFYTNAGCTLVALNPFKPVPQLYSPELMREYH |
| | | AAPQPQKLKPHVFTVGEQTYRNV |
| 1344 | NR4A1 | YGSPCSAPSPSTPSFQPPQLSPWDGSFGHFSPSQTYEGLRA |
| | | WTEQLPKASGPPQPPAFFSFS |
| 1345 | FAT4 | RSKSPQAMASHGSRPGSRLKQPIGQIPLESSPPVGLSIEEVE |
| | | RLNTPRPRNPSICSADHGRS |
| 1346 | CC2D1B | RRGRKINEDEIPPPVALGKRPLAPQEPANRSPETDPPAPPAL |
| | | ESDNPSQPETSLPGISAQPV |
| 1347 | GRB7_0 | LDLSPPHLSSSPEDLCPAPGTPPGTPRPPDTPLPEEVKRSQP |
| | | LLIPTTGRKLREEERRATSL |
| 1348 | GRB7_1 | LIPTTGRKLREEERRATSLPSIPNPFPELCSPPSQSPILGGPSS |
| | | ARGLLPRDASRPHVVKVY |
| 1349 | GRB7_2 | GRKLREEERRATSLPSIPNPFPELCSPPSQSPILGGPSSARGL |
| | | LPRDASRPHVVKVYSEDGA |
| 1350 | STPG1 | PGYYNPSDCTKVPKKTLFPKNPILNFSAQPSPLPPKPPFPGP |
| | | GQYEIVDYLGPRKHFISSAS |
| 1351 | TCOF1 | NPAAARAPSAKGTISAPGKVVTAAAQAKQRSPSKVKPPV |
| | | RNPQNSTVLARGPASVPSVGKAV |
| 1352 | ELF2_0 | PEFIHAAMRPDVITETVVEVSTEESEPMDTSPIPTSPDSHEP |
| | | MKKKKVGRKPKTQQSPISNG |
| 1353 | ELF2_1 | AAMRPDVITETVVEVSTEESEPMDTSPIPTSPDSHEPMKKK |
| | | KVGRKPKTQQSPISNGSPELG |
| 1354 | BRD4_0 | GRGRKETGTAKPGVSTVPNTTQASTPPQTQTPQPNPPPVQ |
| | | ATPHPFPAVTPDLIVQTPVMTV |
| 1355 | BRD4_1 | QATPHPFPAVTPDLIVQTPVMTVVPPQPLQTPPPVPPQPQP |
| | | PPAPAPQPVQSHPPIIAATPQ |
| 1356 | BRD4_2 | PQQPSRPSNRAAALPPKPARPPAVSPALTQTPLLPQPPMAQ |
| | | PPQVLLEDEEPPAPPLTSMQM |
| 1357 | MAP3K9 | DGALKPETLLASRSPSSNGLSPSPGAGMLKTPSPSRDPGEF |
| | | PRLPDPNVVFPPTPRRWNTQQ |
| 1358 | CBFA2T2 | RREENSFDRDTIAPEPPAKRVCTISPAPRHSPALTVPLMNP |
| | | GGQFHPTPPPLQHYTLEDIAT |
| 1359 | MYPN_0 | SEASSEAGVVTTRQTRPDSFQERFNGQATKTPEPSSPVKEP |
| | | PPVLAKPKLDSTQLQQLHNQV |
| 1360 | MYPN_1 | LLVSHPSVQTKSPGGLSIQNEPLPPGPTEPTPPPFTFSIPSGN |
| | | QFQPRCVSPIPVSPTSRIQ |
| 1361 | PTCHD3 | SATGPQWYQESQESESEGKQPPPGPLAPPKSPEPSGPLASE |
| | | QDAPLPEGDDAPPRPSMLDDA |
| 1362 | KDM6B | PPAPPSSCHQNTSGSFRRPESPRPRVSFPKTPEVGPGPPPGP |
| | | LSKAPQPVPPGVGELPARGP |
| 1363 | C2CD5 | GESGLVVRAIGTACTLDKLSSPAAFLPACNSPSKEMKEIPF |
| | | NEDPNPNTHSSGPSTPLKNQT |
| 1364 | SEC16B | GTTTENTFYQDFSGCQGYSEAPGYRSALWLTPEQTCLLQP |
| | | SPQQPFPLQPGSYPAGGGAGQT |
| 1365 | ARAP1_0 | AHTSPAPAPRPTPRPVPMKRHIFRSPPVPATPPEPLPTTTED |
| | | EGLPAAPPIPPRRSCLPPTC |
| 1366 | ARAP1_1 | NGGWHTSSLSLSLPSTIAAPHPMDGPPGGSTPVTPVIKAG |
| | | WLDKNPPQGSYIYQKRWVRLDT |
| 1367 | TRAPPC12 | EGDAGDLGRVRDEAEPGGEGDPGPEPAGTPSPSGEADGD |
| | | CAPEDAAPSSGGAPRQDAAREVP |
| 1368 | ACACA | ADVNLPAAQLQIAMGIPLYRIKDIRMMYGVSPWGDSPIDF |
| | | EDSAHVPCPRGHVIAARITSEN |
| 1369 | UBP1_0 | EDAVEHEQKKSSKRTLPADYGDSLAKRGSCSPWPDAPTA |
| | | YVNNSPSPAPTFTSPQQSTCSVP |
| 1370 | UBP1_1 | LPADYGDSLAKRGSCSPWPDAPTAYVNNSPSPAPTFTSPQ |
| | | QSTCSVPDSNSSSPNHQGDGAS |
| 1371 | DENND1A | AWSGSTLPSRPATPNVATPFTPQFSFPPAGTPTPFPQPPLNP |
| | | FVPSMPAAPPTLPLVSTPAG |
| 1372 | FAM193A_0 | GIMDPPVTDDIHIHQLPLQVDPAPDYLAERSPPSVSSASSGS |
| | | GSSSPITIQQHPRLILTDSG |
| 1373 | FAM193A_1 | SSEADDEEADGESSGEPPGAPKEDGVLGSRSPRTEESKADS |
| | | PPPSYPTQQAEQAPNTCECHV |
| 1374 | FAM193A_2 | LHLYPHIHGHVPLHTVPHLPRPLIHPTLYATPPFTHSKALPP |
| | | APVQNHTNKHQVFNASLQDH |
| 1375 | FAM193A_3 | FHGISKEDHRHSAPAAPRNSPTGLAPLPALSPAALSPAALS |
| | | PASTPHLANLAAPSFPKTATT |
| 1376 | FAM193A_4 | HSAPAAPRNSPTGLAPLPALSPAALSPAALSPASTPHLANL |
| | | AAPSFPKTATTTPGFVDTRKS |
| 1377 | SCYL3 | LNQLVFAEPVAVKSFLPYLLGPKKDHAQGETPCLLSPALF |
| | | QSRVIPVLLQLFEVHEEHVRMV |
| 1378 | QRICH1_0 | LTVHQPTEQPIQVQVQIQGQAPQSAAPSIQTPSLQSPSPSQL |
| | | QAAQIQVQHVQAAQQIQAAE |
| 1379 | QRICH1_1 | PTEQPIQVQVQIQGQAPQSAAPSIQTPSLQSPSPSQLQAAQI |
| | | QVQHVQAAQQIQAAEIPEEH |
| 1380 | TFPT_0 | TIVLEDEGSQGTDAPTPGNAENEPPEKETLSPPRRTPAPPEP |
| | | GSPAPGEGPSGRKRRRVPRD |
| 1381 | TFPT_1 | DEGSQGTDAPTPGNAENEPPEKETLSPPRRTPAPPEPGSPA |
| | | PGEGPSGRKRRRVPRDGRRAG |
| 1382 | CXXC1 | GGPNKIRQKCRLRQCQLRARESYKYFPSSLSPVTPSESLPR |
| | | PRRPLPTQQQPQPSQKLGRIR |
| 1383 | GORASP1 | PSYHKKPPGTPPPSALPLGAPPPDALPPGPTPEDSPSLETGS |
| | | RQSDYMEALLQAPGSSMEDP |
| 1384 | PRR14 | DPLESPPTAPDPALELPSTPPPSSLLRPRLSPWGLAPLFRSV |
| | | RSKLESFADIFLTPNKTPQP |
| 1385 | CRYZL2P-SEC16B | GTTTENTFYQDFSGCQGYSEAPGYRSALWLTPEQTCLLQP |
| | | SPQQPFPLQPGSYPAGGGAGQT |
| 1386 | NTRK1 | PFGQASASIMAAFMDNPFEFNPEDPIPVSFSPVDTNSTSGD |
| | | PVEKKDETPFGVSVAVGLAVF |
| 1387 | HMGXB3 | PGADVPTPSEGTSTSSPLPAPKKPTGADLLTPGSRAPELKG |
| | | RARGKPSLLAAARPMRAILPA |
| 1388 | HMX2 | KAPACFCPDQHGPKEQGPKHHPPIPFPCLGTPKGSGGSGPG |
| | | GLERTPFLSPSHSDFKEEKER |
| 1389 | MGA | KPLILSRKKDQATENTSPLNTPHTSANLVMTPQGQLLTLK |
| | | GPLFSGPVVAVSPDLLESDLKP |
| 1390 | FBF1 | LFPASPTREAHRESSVPVTPSVPPPASQHSTPAGLPPSRAKP |
| | | PTEGAGSPAKASQASKLRAS |
| 1391 | SULT1A1 | KCHRAPIFMRVPFLEFKAPGIPSGMETLKDTPAPRLLKTHL |
| | | PLALLPQTLLDQKVKVVYVAR |
| 1392 | KAT14 | SSSDRTPLTSPSPSPSLDFSAPGTPASHSATPSLLSEADLIPD |
| | | VMPPQALFHDDDEMEGDGV |
| 1393 | ELK1_0 | PERTPGSGSGSGLQAPGPALTPSLLPTHTLTPVLLTPSSLPP |
| | | SIHFWSTLSPIAPRSPAKLS |
| 1394 | ELK1_1 | GSGSGSGLQAPGPALTPSLLPTHTLTPVLLTPSSLPPSIHFW |
| | | STLSPIAPRSPAKLSFQFPS |
| 1395 | DAG1 | IHATPTPVTAIGPPTTAIQEPPSRIVPTPTSPAIAPPTETMAPP |
| | | VRDPVPGKPTVTIRTRGA |
| 1396 | GLIS1 | PLDATTSSHHHLSPLPMAESTRDGLGPGLLSPIVSPLKGLG |
| | | PPPLPPSSQSHSPGGQPFPTL |
| 1397 | PRDM2 | SSASPHPCPSPLSNATAQSPLPILSPTVSPSPSPIPPVEPLMSA |
| | | ASPGPPTLSSSSSSSSSS |
| 1398 | POU2F2_0 | WFCNRRQKEKRINPCSAAPMLPSPGKPASYSPHMVTPQG |
| | | GAGTLPLSQASSSLSTTVTTLSS |
| 1399 | POU2F2_1 | RQKEKRINPCSAAPMLPSPGKPASYSPHMVTPQGGAGTLP |
| | | LSQASSSLSTTVTTLSSAVGTL |
| 1400 | FOXN1_0 | KHAGFSCSSFVSDGPPERTPSLPPHSPRIASPGPEQVQGHCP |
| | | AGPGPGPFRLSPSDKYPGFG |
| 1401 | FOXN1_1 | APGPIPGKNPLQDLLMGHTPSCYGQTYLHLSPGLAPPGPP |
| | | QPLFPQPDGHLELRAQPGTPQD |
| 1402 | RIMS1 | DVELESESVSEKGDLDYYWLDPATWHSRETSPISSHPVTW |
| | | QPSKEGDRLIGRVILNKRTTMP |
| 1403 | MED12L | LYHTHPMPKPRSYYLQPLPLPPEEEEEEPTSPVSQEPERKS |
| | | AELSDQGKTTTDEEKKTKGRK |
| 1404 | REPIN1 | HKRSEGSAQAAPGPGSPQLPAGPQESAAEPTPAVPLKPAQ |
| | | EPPPGAPPEHPQDPIEAPPSLY |
| 1405 | WNK2_0 | SVPAPACPPSLQQHFPDPAMSFAPVLPPPSTPMPTGPGQPA |
| | | PPGQQPPPLAQPTPLPQVLAP |
| 1406 | WNK2_1 | TPLAGIDGLPPALPDLPTATVPPVPPPQYFSPAVILPSLAAP |
| | | LPPASPALPLQAVKLPHPPG |
| 1407 | WNK2_2 | VSASVQSVPTQTATLLPPANPPLPGGPGIASPCPTVQLTVE |
| | | PVQEEQASQDKPPGLPQSCES |
| 1408 | GTF3C2_0 | TPMPKKRGRKSKAELLLLKLSKDLDRPESQSPKRPPEDFET |
| | | PSGERPRRRAAQVALLYLQEL |
| 1409 | GTF3C2_1 | SKAELLLLKLSKDLDRPESQSPKRPPEDFETPSGERPRRRA |
| | | AQVALLYLQELAEELSTALPA |
| 1410 | BTBD18 | TQDSPQIPDPGGDFQEPSGTQPFSSNEQEMSPTRTELCQDS |
| | | PMCTKLQDILVSASHSPDHPV |
| 1411 | STXBP5 | TEVIPMLEVRLLYEINDVETPEGEQPPPLPTPVGGSNPQPIP |
| | | PQSHPSTSSSSSDGLRDNVP |
| 1412 | CNOT1 | CSNVMNKARQPPPGVMPKGRPPSASSLDAISPVQIDPLAG |
| | | MTSLSIGGSAAPHTQSMQGFPP |
| 1413 | CNOT4 | EGAVTESQSLFSDNFRHPNPIPSGLPPFPSSPQTSSDWPTAP |
| | | EPQSLFTSETIPVSSSTDWQ |
| 1414 | FETUB | SQAPATGSENSAVNQKPTNLPKVEESQQKNTPPTDSPSKA |
| | | GPRGSVQYLPDLDDKNSQEKGP |
| 1415 | BCL11A_0 | AMEPPAMDFSRRLRELAGNTSSPPLSPGRPSPMQRLLQPF |
| | | QPGSKPPFLATPPLPPLQSAPP |
| 1416 | BCL11A_1 | SSPPLSPGRPSPMQRLLQPFQPGSKPPFLATPPLPPLQSAPPP |
| | | SQPPVKSKSCEFCGKTFKF |
| 1417 | KDM3B | GPSLSAMGNGRSSSPTSSLTQPIEMPTLSSSPTEERPTVGPG |
| | | QQDNPLLKTFSNVFGRHSGG |
| 1418 | RBM10 | SQSYTIMSPAVLKSELQSPTHPSSALPPATSPTAQESYSQYP |
| | | VPDVSTYQYDETSGYYYDPQ |
| 1419 | KIF20A | KKRLGTNQENQQPNQQPPGKKPFLRNLLPRTPTCQSSTDC |
| | | SPYARILRSRRSPLLKSGPFGK |
| 1420 | DGKZ_0 | YVTEIAQDEIYILDPELLGASARPDLPTPTSPLPTSPCSPTPR |
| | | SLQGDAAPPQGEELIEAAK |
| 1421 | DGKZ_1 | AQDEIYILDPELLGASARPDLPTPTSPLPTSPCSPTPRSLQG |
| | | DAAPPQGEELIEAAKRNDFC |
| 1422 | DGKZ_2 | YILDPELLGASARPDLPTPTSPLPTSPCSPTPRSLQGDAAPP |
| | | QGEELIEAAKRNDFCKLQEL |
| 1423 | FOXF2 | PVPSSPAMASAIECHSPYTSPAAHWSSPGASPYLKQPPALT |
| | | PSSNPAASAGLHSSMSSYSLE |
| 1424 | HSPG2 | NKVGSAEAFAQLLVQGPPGSLPATSIPAGSTPTVQVTPQLE |
| | | TKSIGASVEFHCAVPSDRGTQ |
| 1425 | MIA3 | GSSPTRVLDEGKVNMAPKGPPPFPGVPLMSTPMGGPVPPP |
| | | IRYGPPPQLCGPFGPRPLPPPF |
| 1426 | CREB3L2_0 | PTPPSSHGSDSEGSLSPNPRLHPFSLPQTHSPSRAAPRAPSA |
| | | LSSSPLLTAPHKLQGSGPLV |
| 1427 | CREB3L2_1 | SPNPRLHPFSLPQTHSPSRAAPRAPSALSSSPLLTAPHKLQG |
| | | SGPLVLTEEEKRTLIAEGYP |
| 1428 | NFATC1_0 | PQRSTLMPAAPGVSPKLHDLSPAAYTKGVASPGHCHLGLP |
| | | QPAGEAPAVQDVPRPVATHPGS |
| 1429 | NFATC1_1 | PGHCHLGLPQPAGEAPAVQDVPRPVATHPGSPGQPPPALL |
| | | PQQVSAPPSSSCPPGLEHSLCP |
| 1430 | PDE5A | PVCKEGIRGHTESCSCPLQQSPRADNSAPGTPTRKISASEF |
| | | DRPLRPIVVKDSEGTVSFLSD |
| 1431 | PRDM15 | ELRVWYAAFYAKKMDKPMLKQAGSGVHAAGTPENSAPV |
| | | ESEPSQWACKVCSATFLELQLLNE |
| 1432 | MYBL2_0 | VTTPLHRDKTPLHQKHAAFVTPDQKYSMDNTPHTPTPFK |
| | | NALEKYGPLKPLPQTPHLEEDLK |
| 1433 | MYBL2_1 | HRDKTPLHQKHAAFVTPDQKYSMDNTPHTPTPFKNALEK |
| | | YGPLKPLPQTPHLEEDLKEVLRS |
| 1434 | ZYX | YVPPPVATPFSSKSSTKPAAGGTAPLPPWKSPSSSQPLPQV |
| | | PAPAQSQTQFHVQPQPQPKPQ |
| 1435 | FCMR | ARGADAAGTGEAPVPGPGAPLPPAPLQVSESPWLHAPSLK |
| | | TSCEYVSLYHQPAAMMEDSDSD |
| 1436 | ATG12_0 | MAEEPQSVLQLPTSIAAGGEGLTDVSPETTTPEPPSSAAVS |
| | | PGTEEPAGDTKKKIDILLKAV |
| 1437 | ATG12_1 | LPTSIAAGGEGLTDVSPETTTPEPPSSAAVSPGTEEPAGDTK |
| | | KKIDILLKAVGDTPIMKTKK |
| 1438 | DLGAP2 | LCSGHTCGLAPPEDCEHLHHGPDARPPYLLSPADSCPGGR |
| | | HRCSPRSSVHSECVMMPVVLGD |
| 1439 | DNM3_0 | LGIIGDISTATVSTPAPPPVDDSWIQHSRRSPPPSPTTQRRPT |
| | | LSAPLARPTSGRGPAPAIP |
| 1440 | DNM3_1 | PPSPTTQRRPTLSAPLARPTSGRGPAPAIPSPGPHSGAPPVP |
| | | FRPGPLPPFPSSSDSFGAPP |
| 1441 | KLF16 | LAASILADLRGGPGAAPGGASPASSSSAASSPSSGRAPGAA |
| | | PSAAAKSHRCPFPDCAKAYYK |
| 1442 | WNT6 | TQACSMGELLQCGCQAPRGRAPPRPSGLPGTPGPPGPAGS |
| | | PEGSAAWEWGGCGDDVDFGDEK |
| 1443 | MUC16_0 | MTYTEKSEVSSSIHPRPETSAPGAETTLTSTPGNRAISLTLP |
| | | FSSIPVEEVISTGITSGPDI |
| 1444 | MUC16_1 | RGPGDMSWQSSPSLENPSSLPSLLSLPATTSPPPISSTLPVTI |
| | | SSSPLPVTSLLTSSPVTTT |
| 1445 | MUC16_2 | PEDVSWPSPLSVEKNSPPSSLVSSSSVTSPSPLYSTPSGSSHS |
| | | SPVPVTSLFTSIMMKATDM |
| 1446 | BCAR1 | ETYDVPPAFAKAKPFDPARTPLVLAAPPPDSPPAEDVYDV |
| | | PPPAPDLYDVPPGLRRPGPGTL |
| 1447 | FOXO4 | APGPSSLVPTLSMIAPPPVMASAPIPKALGTPVLTPPTEAAS |
| | | QDRMPQDLDLDMYMENLECD |
| 1448 | AKT1S1 | RCLHDIALAHRAATAARPPAPPPAPQPPSPTPSPPRPTLARE |
| | | DNEEDEDEPTETETSGEQLG |
| 1449 | COL5A2 | AIGTDGTPGAKGPTGSPGTSGPPGSAGPPGSPGPQGSTGPQ |
| | | GIRGQPGDPGVPGFKGEAGPK |
| 1450 | CTC1_0 | SYLPPARWNSSGEGHLELWDAPVPVFPLTISPGPVTPIPVL |
| | | YPESASCLLRLRNKLRGVQRN |
| 1451 | CTC1_1 | ARWNSSGEGHLELWDAPVPVFPLTISPGPVTPIPVLYPESA |
| | | SCLLRLRNKLRGVQRNLAGSL |
| 1452 | SH2D6 | PLSLAPAHLPGTEEDSLYLDHSGPLGPSKPSPPLPQPTMLK |
| | | GAVSLPVAGKQGPIFGRREQG |
| 1453 | KSR1 | DSSSNPSSTTSSTPSSPAPFPTSSNPSSATTPPNPSPGQRDSR |
| | | FNFPAAYFIHHRQQFIFPV |
| 1454 | C1orf127_0 | AAPVLWTVESFFQCVGSGTESPASTAALRTTPSPPSPGPET |
| | | PPAGVPPAASSQVWAAGPAAQ |
| 1455 | C1orf127_1 | WTVESFFQCVGSGTESPASTAALRTTPSPPSPGPETPPAGV |
| | | PPAASSQVWAAGPAAQEWLSR |
| 1456 | C1orf127_2 | FFQCVGSGTESPASTAALRTTPSPPSPGPETPPAGVPPAASS |
| | | QVWAAGPAAQEWLSRDLLHR |
| 1457 | C1orf127_3 | QTSASILPRVVQAQRGPQPPPGEAGIPGHPTPPATLPSEPVE |
| | | GVQASPWRPRPVLPTHPALT |
| 1458 | C1orf127_4 | GVQASPWRPRPVLPTHPALTLPVSSDASSPSPPAPRPERPES |
| | | LLVSGPSVTLTEGLGTVRPE |
| 1459 | C1orf127_5 | GHMDLSSSEPSQDIEGPGLSILPARDATFSTPSVRQPDPSA |
| | | WLSSGPELTGMPRVRLAAPLA |
| 1460 | C2CD4D_0 | AEPAARWAPSGLFSKRRAPGPPTSACPNVLTPDRIPQFFIPP |
| | | RLPDPGGAVPAARRHVAGRG |
| 1461 | C2CD4D_1 | SDTASSPDSSPFGSPRPGLGRRRVSRPHSLSPEKASSADTSP |
| | | HSPRRAGPPTPPLFHLDFLC |
| 1462 | LHX6 | TLQKLADMTGLSRRVIQVWFQNCRARHKKHTPQHPVPPS |
| | | GAPPSRLPSALSDDIHYTPFSSP |
| 1463 | FRMD1 | MAVPPRGRGIDPARTNPDTFPPSGARCMEPSPERPACSQQ |
| | | EPTLGMDAMASEHRDVLVLLPS |
| 1464 | SPHK2_0 | TLGTVLGLATLHTYRGRLSYLPATVEPASPTPAHSLPRAKS |
| | | ELTLTPDPAPPMAHSPLHRSV |
| 1465 | SPHK2_1 | GRLSYLPATVEPASPTPAHSLPRAKSELTLTPDPAPPMAHS |
| | | PLHRSVSDLPLPLPQPALASP |
| 1466 | SPHK2_2 | EPASPTPAHSLPRAKSELTLTPDPAPPMAHSPLHRSVSDLP |
| | | LPLPQPALASPGSPEPLPILS |
| 1467 | SPHK2_3 | AGDWGGAGDAPLSPDPLLSSPPGSPKAALHSPVSEGAPVIP |
| | | PSSGLPLPTPDARVGASTCGP |
| 1468 | LACTB | GAAPAQSPAAPDPEASPLAEPPQEQSLAPWSPQTPAPPCSR |
| | | CFARAIESSRDLLHRIKDEVG |
| 1469 | SMAD2 | YISEDGETSDQQLNQSMDTGSPAELSPTTLSPVNHSLDLQP |
| | | VTYSEPAFWCSIAYYELNQRV |
| 1470 | TET3_0 | AKEKNISLQTAIAIEALTQLSSALPQPSHSTPQASCPLPEAL |
| | | SPPAPFRSPQSYLRAPSWPV |
| 1471 | TET3_1 | KRSLFLEQVHDTSFPAPSEPSAPGWWPPPSSPVPRLPDRPP |
| | | KEKKKKLPTPAGGPVGTEKAA |
| 1472 | COL1A1 | PPGERGGPGSRGFPGADGVAGPKGPAGERGSPGPAGPKGS |
| | | PGEAGRPGEAGLPGAKGLTGSP |
| 1473 | PER1_0 | RDFTQEKSVFCRIRGGPDRDPGPRYQPFRLTPYVTKIRVSD |
| | | GAPAQPCCLLIAERIHSGYEA |
| 1474 | PER1_1 | HQNPRAEAPCYVSHPSPVPPSTPWPTPPATTPFPAVVQPYP |
| | | LPVFSPRGGPQPLPPAPTSVP |
| 1475 | PER1_2 | LPNYLFPTPSSYPYGALQTPAEGPPTPASHSPSPSLPALAPS |
| | | PPHRPDSPLFNSRCSSPLQL |
| 1476 | CARMIL1 | ENRFGLGTPEKNTKAEPKAEAGSRSRSSSSTPTSPKPLLQS |
| | | PKPSLAARPVIPQKPRTASRP |
| 1477 | CDCA8 | VGRLEVSMVKPTPGLTPRFDSRVFKTPGLRTPAAGERIYNI |
| | | SGNGSPLADSKEIFLTVPVGG |
| 1478 | AMPH_0 | AFTIQGAPSDSGPLRIAKTPSPPEEPSPLPSPTASPNHTLAPA |
| | | SPAPARPRSPSQTRKGPPV |
| 1479 | AMPH_1 | LRIAKTPSPPEEPSPLPSPTASPNHTLAPASPAPARPRSPSQT |
| | | RKGPPVPPLPKVTPTKELQ |
| 1480 | POGZ_0 | QKKGKSLDSEPSVPSAAKPPSPEKTAPVASTPSSTPIPALSP |
| | | PTKVPEPNENVGDAVQTKLI |
| 1481 | POGZ_1 | PSVPSAAKPPSPEKTAPVASTPSSTPIPALSPPTKVPEPNEN |
| | | VGDAVQTKLIMLVDDFYYGR |
| 1482 | POGZ_2 | AGATPAEPEELLTPLAPALPSPASTATPPPTPTHPQALALPP |
| | | LATEGAECLNVDDQDEGSPV |
| 1483 | NRIP1 | YARTSVIESPSTNRTTPVSTPPLLTSSKAGSPINLSQHSLVIK |
| | | WNSPPYVCSTQSEKLTNTA |
| 1484 | CHRNA4 | ATSGTQSLHPPSPSFCVPLDVPAEPGPSCKSPSDQLPPQQPL |
| | | EAEKASPHPSPGPCRPPHGT |
| 1485 | PIK3R2 | RPRGPRPLPARPRDGAPEPGLTLPDLPEQFSPPDVAPPLLV |
| | | KLVEAIERTGLDSESHYRPEL |
| 1486 | ADAM17 | LSLFHPSNVEMLSSMDSASVRIIKPFPAPQTPGRLQPAPVIP |
| | | SAPAAPKLDHQRMDTIQEDP |
| 1487 | PXN_0 | LLLELNAVQHNPPGFPADEANSSPPLPGALSPLYGVPETNS |
| | | PLGGKAGPLTKEKPKRNGGRG |
| 1488 | PXN_1 | NPPGFPADEANSSPPLPGALSPLYGVPETNSPLGGKAGPLT |
| | | KEKPKRNGGRGLEDVRPSVES |
| 1489 | SNAI2 | THTVIISPYLYESYSMPVIPQPEILSSGAYSPITVWTTAAPFH |
| | | AQLPNGLSPLSGYSSSLGR |
| 1490 | IRS2 | NSASVENVSLRKSSEGGVGVGPGGGDEPPTSPRQLQPAPP |
| | | LAPQGRPWTPGQPGGLVGCPGS |
| 1491 | USP10_0 | DGTGSASGTLPVSQPKSWASLFHDSKPSSSSPVAYVETKY |
| | | SPPAISPLVSEKQVEVKEGLVP |
| 1492 | USP10_1 | PVSQPKSWASLFHDSKPSSSSPVAYVETKYSPPAISPLVSE |
| | | KQVEVKEGLVPVSEDPVAIKI |
| 1493 | USP10_2 | KSWASLFHDSKPSSSSPVAYVETKYSPPAISPLVSEKQVEV |
| | | KEGLVPVSEDPVAIKIAELLE |
| 1494 | GFI1B | EPELEQDQNLARMAPAPEGPIVLSRPQDGDSPLSDSPPFYK |
| | | PSFSWDTLATTYGHSYRQAPS |
| 1495 | LPA | PVTESSVLTTPTVAPVPSTEAPSEQAPPEKSPVVQDCYHGD |
| | | GRSYRGISSTTVTGRTCQSWS |
| 1496 | TNKS1BP1 | QTPEASQASPCPAVTPSAPSAALPDEGSRHTPSPGLPAEGA |
| | | PEAPRPSSPPPEVLEPHSLDQ |
| 1497 | NIPBL_0 | YQQTTISHSPSSRFVPPQTSSGNRFMPQQNSPVPSPYAPQSP |
| | | AGYMPYSHPSSYTTHPQMQQ |
| 1498 | NIPBL_1 | SSRFVPPQTSSGNRFMPQQNSPVPSPYAPQSPAGYMPYSHP |
| | | SSYTTHPQMQQASVSSPIVAG |
| 1499 | FOXL2 | AHHLHAAAAPPPAPPHHGAAAPPPGQLSPASPATAAPPAP |
| | | APTSAPGLQFACARQPELAMMH |
| 1500 | PLEKHG5 | AGTHGTPSAPSRSLSELCLAVPAPGIRTQGSPQEAGPSWDC |
| | | RGAPSPGSGPGLVGCLAGEPA |
| 1501 | COL11A1 | DDGMRGEDGEIGPRGLPGEAGPRGLLGPRGTPGAPGQPG |
| | | MAGVDGPPGPKGNMGPQGEPGPP |
| 1502 | PSD4 | SQDRDEREGGHPQESLPCTLAPCPWRSPASSPEPSSPESESR |
| | | GPGPRPSPASSQEGSPQLQH |
| 1503 | MAP4K1_0 | ESSDDDYDDVDIPTPAEDTPPPLPPKPKFRSPSDEGPGSMG |
| | | DDGQLSPGVLVRCASGPPPNS |
| 1504 | MAP4K1_1 | PSDEGPGSMGDDGQLSPGVLVRCASGPPPNSPRPGPPPSTS |
| | | SPHLTAHSEPSLWNPPSRELD |
| 1505 | COL3A1_0 | GPGAAGFPGARGLPGPPGSNGNPGPPGPSGSPGKDGPPGP |
| | | AGNTGAPGSPGVSGPKGDAGQP |
| 1506 | COL3A1_1 | AAGIKGHRGFPGNPGAPGSPGPAGQQGAIGSPGPAGPRGP |
| | | VGPSGPPGKDGTSGHPGPIGPP |
| 1507 | TBKBP1_0 | SSLQGRILRTLLQEQARSGGQRHSPLSQRHSPAPQCPSPSPP |
| | | ARAAPPCPPCQSPVPQRRSP |
| 1508 | TBKBP1_1 | SPAPQCPSPSPPARAAPPCPPCQSPVPQRRSPVPPCPSPQQR |
| | | RSPASPSCPSPVPQRRSPVP |
| 1509 | TBKBP1_2 | RAAPPCPPCQSPVPQRRSPVPPCPSPQQRRSPASPSCPSPVP |
| | | QRRSPVPPSCQSPSPQRRSP |
| 1510 | TBKBP1_3 | CQSPVPQRRSPVPPCPSPQQRRSPASPSCPSPVPQRRSPVPP |
| | | SCQSPSPQRRSPVPPSCPAP |
| 1511 | INSYN1 | LDVSTPSDSVDGPESTRPGAGPDYRLMNGGTPIPNGPRVE |
| | | TPDSSSEEAFGAGPTVKSQLPQ |
| 1512 | PLEKHA4 | HRMMTGGNLDSQGDPLPGVPLPPSDPTRQETPPPRSPPVA |
| | | NSGSTGFSRRGSGRGGGPTPWG |
| 1513 | GIGYF2 | LSQIPSDTASPLLILPPPVPNPSPTLRPVETPVVGAPGMGSV |
| | | STEPDDEEGLKHLEQQAEKM |
| 1514 | YIF1B | AVDTMYVGRKLGLLFFPYLHQDWEVQYQQDTPVAPRFD |
| | | VNAPDLYIPAMAFITYVLVAGLAL |
| 1515 | EIF4ENIF1 | SQANRYTKEQDYRPKATGRKTPTLASPVPTTPFLRPVHQV |
| | | PLVPHVPMVRPAHQLHPGLVQR |
| 1516 | KAT5 | IPGGEPDQPLSSSSCLQPNHRSTKRKVEVVSPATPVPSETAP |
| | | ASVFPQNGAARRAVAAQPGR |
| 1517 | MICALL1_0 | IMTYVSQYYNHFCSPGQAGVSPPRKGLAPCSPPSVAPTPV |
| | | EPEDVAQGEELSSGSLSEQGTG |
| 1518 | MICALL1_1 | PFEEEEEDKEEEAPAAPSLATSPALGHPESTPKSLHPWYGI |
| | | TPTSSPKTKKRPAPRAPSASP |
| 1519 | MICALL1_2 | EAPAAPSLATSPALGHPESTPKSLHPWYGITPTSSPKTKKR |
| | | PAPRAPSASPLALHASRLSHS |
| 1520 | MICALL1_3 | APSLATSPALGHPESTPKSLHPWYGITPTSSPKTKKRPAPR |
| | | APSASPLALHASRLSHSEPPS |
| 1521 | MED26 | HTSSPGLGKPPGPCLQPKASVLQQLDRVDETPGPPHPKGPP |
| | | RCSFSPRNSRHEGSFARQQSL |
| 1522 | ANKRD40_0 | VPNYLANPAFPFIYTPTAEDSAQMQNGGPSTPPASPPADGS |
| | | PPLLPPGEPPLLGTFPRDHTS |
| 1523 | ANKRD40_1 | PFIYTPTAEDSAQMQNGGPSTPPASPPADGSPPLLPPGEPPL |
| | | LGTFPRDHTSLALVQNGDVS |
| 1524 | DBP | AALPAATTPGPGLETAGPADAPAGAVVGGGSPRGRPGPV |
| | | PAPGLLAPLLWERTLPFGDVEYV |
| 1525 | FHIP1B_0 | ALFLRQQSLGGSESPGPAPCSPGLSASPASSPGRRPTPAEEP |
| | | GELEDNYLEYLREARRGVDR |
| 1526 | FHIP1B_1 | SPLEPPLPLEEEEAYESFTCPPEPPGPFLSSPLRTLNQLPSQP |
| | | FTGPFMAVLFAKLENMLQN |
| 1527 | EXOSC10 | ALADFIHQQRTQQVEQDMFAHPYQYELNHFTPADAVLQK |
| | | PQPQLYRPIEETPCHFISSLDEL |
| 1528 | KRTAP10-7 | CSDSWQVDDCPESCCEPPCCAPAPCLSLVCTPVSYVSSPCC |
| | | RVTCEPSPCQSGCTSSCTPSC |
| 1529 | KIAA0754_0 | EEPTSPAAAVPTPEEPASPAAAVPTPEEPASPAAAVPTPEEP |
| | | AFPAPAVPTPEESASAAVAV |
| 1530 | KIAA0754_1 | AAVPTPEEPASPAAAVPTPEEPAFPAPAVPTPEESASAAVA |
| | | VPTPEESASPAAAVPTPAESA |
| 1531 | KIAA0754_2 | AVVATLEEPTSPAASVPTPAAMVATLEEFTSPAASVPTSEE |
| | | PASLAAAVSNPEEPTSPAAAV |
| 1532 | ATG9B_0 | FSPPTAGPPCSVLQGTGASQSCHSALPIPATPPTQAQPAMT |
| | | PASASPSWGSHSTPPLAPATP |
| 1533 | ATG9B_1 | SVLQGTGASQSCHSALPIPATPPTQAQPAMTPASASPSWGS |
| | | HSTPPLAPATPTPSQQCPQDS |
| 1534 | ATG9B_2 | TGASQSCHSALPIPATPPTQAQPAMTPASASPSWGSHSTPP |
| | | LAPATPTPSQQCPQDSPGLRV |
| 1535 | ATG9B_3 | PTQAQPAMTPASASPSWGSHSTPPLAPATPTPSQQCPQDSP |
| | | GLRVGPLIPEQDYERLEDCDP |
| 1536 | ILF3 | RDSSKGEDSAEETEAKPAVVAPAPVVEAVSTPSAAFPSDA |
| | | TAEQGPILTKHGKNPVMELNEK |
| 1537 | SLC25A46 | RSFSTGSDLGHWVTTPPDIPGSRNLHWGEKSPPYGVPTTST |
| | | PYEGPTEEPFSSGGGGSVQGQ |
| 1538 | CBS | PEDKEAKEPLWIRPDAPSRCTWQLGRPASESPHHHTAPAK |
| | | SPKILPDILKKIGDTPMVRINK |
| 1539 | PELP1 | SSFCSEALVTCAALTHPRVPPLQPMGPTCPTPAPVPPPEAP |
| | | SPFRAPPFHPPGPMPSVGSMP |
| 1540 | PAK5 | QKFTGLPQQWHSLLADTANRPKPMVDPSCITPIQLAPMKT |
| | | IVRGNKPCKETSINGLLEDFDN |
| 1541 | NR4A3_0 | DPPMKAVPTVAGARFPLFHFKPSPPHPPAPSPAGGHHLGY |
| | | DPTAAAALSLPLGAAAAAGSQA |
| 1542 | NR4A3_1 | GSQAAALESHPYGLPLAKRAAPLAFPPLGLTPSPTASSLLG |
| | | ESPSLPSPPSRSSSSGEGTCA |
| 1543 | TFAP2A | HDGTSNGTARLPQLGTVGQSPYTSAPPLSHTPNADFQPPY |
| | | FPPPYQPIYPQSQDPYSHVNDP |
| 1544 | FAM161A | IKREKILADIEADEENLKETRWPYLSPRRKSPVRCAGVNPV |
| | | PCNCNPPVPTVSSRGREQAVR |
| 1545 | ADAMTS14 | HRLCCVSCIKKASGPNPGPDPGPTSLPPFSTPGSPLPGPQDP |
| | | ADAAEPPGKPTGSEDHQHGR |
| 1546 | FNDC3A | VQVNPGEAFTIRREDGQFQCITGPAQVPMMSPNGSVPPIY |
| | | VPPGYAPQVIEDNGVRRVVVVP |
| 1547 | GDF6 | GAELRLFRQAPSAPWGPPAGPLHVQLFPCLSPLLLDARTL |
| | | DPQGAPPAGWEVFDVWQGLRHQ |
| 1548 | ZMYND8 | SASEESMDFLDKSTASPASTKTGQAGSLSGSPKPFSPQLSA |
| | | PITTKTDKTSTTGSILNLNLD |
| 1549 | SOX8 | QGDYGDLQASSYYGAYPGYAPGLYQYPCFHSPRRPYASP |
| | | LLNGLALPPAHSPTSHWDQPVYT |
| 1550 | ROBO4 | QTQPPVAPQAPSSILLPAAPIPILSPCSPPSPQASSLSGPSPAS |
| | | SRLSSSSLSSLGEDQDSV |
| 1551 | MYO15A_0 | SPPVPPRPPSSGPPPAPPLSPALSGLPRPASPYGSLRRHPPP |
| | | WAAPAHVPPAPQASWWAFVE |
| 1552 | MYO15A_1 | RRHPPPWAAPAHVPPAPQASWWAFVEPPAVSPEVPPDLL |
| | | AFPGPRPSFRGSRRRGAAFGFPG |
| 1553 | MYO15A_2 | PPFLPPARRPRSLQESPAPRRAAGRLGPPGSPLPGSPRPPSP |
| | | PLGLCHSPRRSSLNLPSRLP |
| 1554 | MYO15A_3 | SLPAEKPPAPEAQPTSVGTGPPAKPVLLRATPKPLAPAPLA |
| | | KAPRLPIKPVAAPVLAQDQAS |
| 1555 | NCOR2_0 | PKPPATLGADGPPPGPPTPPPEDIPAPTEPTPASEATGAPTPP |
| | | PAPPSPSAPPPVVPKEEKE |
| 1556 | NCOR2_1 | GPPPGPPTPPPEDIPAPTEPTPASEATGAPTPPPAPPSPSAPPP |
| | | VVPKEEKEEETAAAPPVE |
| 1557 | ELK3 | AAAASAFLASSVSAKISSLMLPNAASISSASPFSSRSPSLSP |
| | | NSPLPSEHRSLFLEAACHDS |
| 1558 | E2F7_0 | VGPSSGQLPSFSVPCMVLPSPPLGPFPVLYSPAMPGPVSST |
| | | LGALPNTGPVNFSLPGLGSIA |
| 1559 | E2F7_1 | SHSVVQQPESPVYVGHPVSVVKLHQSPVPVTPKSIQRTHR |
| | | ETFFKTPGSLGDPVLKRRERNQ |
| 1560 | KLF4 | GLMGKFVLKASLSAPGSEYGSPSVISVSKGSPDGSHPVVV |
| | | APYNGGPPRTCPKIKQEAVSSC |
| 1561 | PKD1 | WEPLKVLLEALYFSLVAKRLHPDEDDTLVESPAVTPVSAR |
| | | VPRVRPPHGFALFLAKEEARKV |
| 1562 | ATXN2_0 | VPWPSPCPSPSSRPPSRYQSGPNSLPPRAATPTRPPSRPPSRP |
| | | SRPPSHPSAHGSPAPVSTM |
| 1563 | ATXN2_1 | NPNAKEFNPRSFSQPKPSTTPTSPRPQAQPSPSMVGHQQPT |
| | | PVYTQPVCFAPNMMYPVPVSP |
| 1564 | ATXN2_2 | SFSQPKPSTTPTSPRPQAQPSPSMVGHQQPTPVYTQPVCFA |
| | | PNMMYPVPVSPGVQPLYPIPM |
| 1565 | ATXN2_3 | SPSMVGHQQPTPVYTQPVCFAPNMMYPVPVSPGVQPLYPI |
| | | PMTPMPVNQAKTYRAVPNMPQQ |
| 1566 | KNG1 | IQSDDDWIPDIQIDPNGLSFNPISDFPDTTSPKCPGRPWKSV |
| | | SEINPTTQMKESYYFDLTDG |
| 1567 | ULK1 | SHGLQSCRNLRGSPKLPDFLQRNPLPPILGSPTKAVPSFDFP |
| | | KTPSSQNLLALLARQGVVMT |
| 1568 | WEE1_0 | EEEEEEEGSGHSTGEDSAFQEPDSPLPPARSPTEPGPERRRS |
| | | PGPAPGSPGELEEDLLLPGA |
| 1569 | WEE1_1 | FQEPDSPLPPARSPTEPGPERRRSPGPAPGSPGELEEDLLLP |
| | | GACPGADEAGGGAEGDSWEE |
| 1570 | COL2A1_0 | PAGEQGPRGDRGDKGEKGAPGPRGRDGEPGTPGNPGPPG |
| | | PPGPPGPPGLGGNFAAQMAGGFD |
| 1571 | COL2A1_1 | LVGPRGERGFPGERGSPGAQGLQGPRGLPGTPGTDGPKGA |
| | | SGPAGPPGAQGPPGLQGMPGER |
| 1572 | COL2A1_2 | APGASGDRGPPGPVGPPGLTGPAGEPGREGSPGADGPPGR |
| | | DGAAGVKGDRGETGAVGAPGAP |
| 1573 | CACNA1G | LQLPKDAPHLLQPHSAPTWGTIPKLPPPGRSPLAQRPLRRQ |
| | | AAIRTDSLDVQGLGSREDLLA |
| 1574 | PTK2_0 | RMESRRQATVSWDSGGSDEAPPKPSRPGYPSPRSSEGFYP |
| | | SPQHMVQTNHYQVSGYPGSHGI |
| 1575 | PTK2_1 | SWDSGGSDEAPPKPSRPGYPSPRSSEGFYPSPQHMVQTNH |
| | | YQVSGYPGSHGITAMAGSIYPG |
| 1576 | TAB3 | QSSPQGPVPHYSQRPLPVYPHQQNYQPSQYSPKQQQIPQS |
| | | AYHSPPPSQCPSPFSSPQHQVQ |
| 1577 | FCRLA | ETASVVAITVQELFPAPILRAVPSAEPQAGSPMTLSCQTKL |
| | | PLQRSAARLLFSFYKDGRIVQ |
| 1578 | PTCH1 | LNGLVLLPVLLSFFGPYPEVSPANGLNRLPTPSPEPPPSVVR |
| | | FAMPPGHTHSGSDSSDSEYS |
| 1579 | ZNF804A | CEVYQHILQPNMLANKVKFTFPPAALPPPSTPLQPLPLQQS |
| | | LCSTSVTTIHHTVLQQHAAAA |
| 1580 | RGS12 | VQESSDSPSTSPGSASSPPGPPGTTPPGQKSPSGPFCTPQSP |
| | | VSLAQEGTAQIWKRQSQEVE |
| 1581 | COL5A1_0 | FPGDRGLPGPVGALGLKGNEGPPGPPGPAGSPGERGPAGA |
| | | AGPIGIPGRPGPQGPPGPAGEK |
| 1582 | COL5A1_1 | ERGEKGESGPSGAAGPPGPKGPPGDDGPKGSPGPVGFPGD |
| | | PGPPGEPGPAGQDGPPGDKGDD |
| 1583 | COL5A1_2 | PIGPQGAPGKPGPDGLRGIPGPVGEQGLPGSPGPDGPPGPM |
| | | GPPGLPGLKGDSGPKGEKGHP |
| 1584 | PAK4 | APNGPSAGGLAIPQSSSSSSRPPTRARGAPSPGVLGPHASEP |
| | | QLAPPACTPAAPAVPGPPGP |
| 1585 | SFPQ | GVGSAPPASSSAPPATPPTSGAPPGSGPGPTPTPPPAVTSAP |
| | | PGAPPPTPPSSGVPTTPPQA |
| 1586 | ANKRD11 | DSPMPPSMEDRAPLPPVPAEKFACLSPGYYSPDYGLPSPK |
| | | VDALHCPPAAVVTVTPSPEGVF |
| 1587 | TICRR_0 | TPRTPKRQGTQPPGFLPNCTWPHSVNSSPESPSCPAPPTSST |
| | | AQPRRECLTPIRDPLRTPPR |
| 1588 | TICRR_1 | PALSMPRASRSLSKPEPTYVSPPCPRLSHSTPGKSRGQTYIC |
| | | QACTPTHGPSSTPSPFQTDG |
| 1589 | PSMB8 | APRGQRPESALPVAGSGRRSDPGHYSFSMRSPELALPRGM |
| | | QPTEFFQSLGGDGERNVQIEMA |
| 1590 | STIM1_0 | LAKKALLALNHGLDKAHSLMELSPSAPPGGSPHLDSSRSH |
| | | SPSSPDPDTPSPVGDSRALQAS |
| 1591 | STIM1_1 | HGLDKAHSLMELSPSAPPGGSPHLDSSRSHSPSSPDPDTPS |
| | | PVGDSRALQASRNTRIPHLAG |
| 1592 | CAPN15 | MLEPGEYAVVCCAFNHWGPPLPGTPAPQASSPSAGVPRAS |
| | | PEPPGHVLAVYSSRLVMVEPVE |
| 1593 | BAHCC1 | PTAPGAPSPAAGPTKLPPCCHPPDPKPPASSPTPPPRPSAPC |
| | | TLNVCPASSPGPGSRVRSAE |
| 1594 | KIAA1210_0 | QVIIRGLPVWFSHFQGILEGSLQCVTQTLETPNLDEPLPVEP |
| | | KEEEPNLPLVSEEEKSITKP |
| 1595 | KIAA1210_1 | GNLTKISYVADKQQSRPKSESMAKKQPACKTPGKPAGQQ |
| | | SDYAVSEPVWITMAKQKQKSFKA |
| 1596 | MYO9B_0 | ASTESLLEERAGRGASEGPPAPALPCPGAPTPSPLPTVAAP |
| | | PRRRPSSFVTVRVKTPRRTPI |
| 1597 | MYO9B_1 | WAPGAREAAAPVRRREPPARRPDQIHSVYITPGADLPVQG |
| | | ALEPLEEDGQPPGAKRRYSDPP |
| 1598 | TRPM2 | FRGAVYHSYLTIFGQIPGYIDGVNFNPEHCSPNGTDPYKPK |
| | | CPESDATQQRPAFPEWLTVLL |
| 1599 | TBX10 | AFLSAGLGILAPSETYPLPTTSSGWEPRLGSPFPSGPCTSST |
| | | GAQAVAEPTGQGPKNPRVSR |
| 1600 | C11orf53 | ALLEPYFPQEPYGDYRPPALTPNAGSLFSASPLPPLLPPPFP |
| | | GDPAHFLFRDSWEQTLPDGL |
| 1601 | UNC13A | LPPAAPGKEDKAPVAPTEAPDMAKVAPKPATPDKVPAAE |
| | | QIPEAEPPKDEESFRPREDEEGQ |
| 1602 | AGAP2_0 | VPPGPPLSGGLSPDPKPGGAPTSSRRPLLSSPSWGGPEPEG |
| | | RAGGGIPGSSSPHPGTGSRRL |
| 1603 | AGAP2_1 | KGKSKTLDNSDLHPGPPAGSPPPLTLPPTPSPATAVTAASA |
| | | QPPGPAPPITLEPPAPGLKRG |
| 1604 | SOCS1 | VAHNQVAADNAVSTAAEPRRRPEPSSSSSSSPAAPARPRP |
| | | CPAVPAPAPGDTHFRTFRSHAD |
| 1605 | SPATA31D4 | LADLFSPSPLRDPLPPQPVSPLDSKFPIDHSPPQQLPFPLLPP |
| | | HHIERVEPSLQPEASLSLN |
| 1606 | KIAA1671 | IIDVDALWSHRGSEDGPRPQSNWKESANKMSPSGGAPQTT |
| | | PTLRSRPKDLPVRRKTDVISDT |
| 1607 | PROX2 | RVQLQAGVPVGNLSLAKRLDSPRYPIPPRMTPKPCQDPPA |
| | | NFPLTAPSHIQENQILSQLLGH |
| 1608 | LRRC37A3 | PEHSHLTQATVQPLDLGFTITPESMTEVELSPTMKETPTQP |
| | | PKKVVPQLRVYQGVTNPTPGQ |
| 1609 | POM121L2 | TIWSLRHPRPIWSPVTIRITPPDQRVPPSTSPEDVIALAGLPP |
| | | SEELADPCSKETVLRALRE |
| 1610 | LRRC66 | SAHYSEVPYGDPRDTGPSVFPPRWDSGLDVTPANKEPVQ |
| | | KSTPSDTCCELESDCDSDEGSLF |
| 1611 | KIF26A_0 | LQAPASHEDLDAPHGGPSLAPPSTTTSSRDTPGPAGPAGR |
| | | QPGRAGPDRTKGLAWSPGPSVQ |
| 1612 | KIF26A_1 | TSSRDTPGPAGPAGRQPGRAGPDRTKGLAWSPGPSVQVS |
| | | VAPAGLGGALSTVTIQAQQCLEG |
| 1613 | KIF26A_2 | TFAELQERLECMDGNEGPSGGPGGTDGAQASPARGGRKP |
| | | SPPEAASPRKAVGTPMAASTPRG |
| 1614 | KIF26A_3 | LAPKAGFLPRPSGAAPPAPPTRKSSLEQRSSPASAPPHAVN |
| | | PARVGAAAVLRGEEEPRPSSR |
| 1615 | PRRC2B | DQKCKQARKAGEARKQAEKEVPWSPSAEKASPQENGPA |
| | | VHKGSPEFPAQETPTTFPEEAPTV |
| 1616 | BNC1 | KGQPAFPNIGQNGVLFPNLKTVQPVLPFYRSPATPAEVAN |
| | | TPGILPSLPLLSSSIPEQLISN |
| 1617 | SPATA31D3 | LADLFSPSPLRDPLPPQPVSPLDSKFPIDHSPPQQLPFPLLPP |
| | | HHIERVEPSLQPEASLSLN |
| 1618 | CXorf49_0 | ADTSRQASFHCKESYLPVPGRFLTSAPRGLTPVAERPAVG |
| | | ELEDSPQKKMQSRAWGKVEVRP |
| 1619 | CXorf49_1 | RLSVRRGEFSSSDPNIRAPQLPGTSEPSAYSPGGLVPRRHA |
| | | PSGNQQPPVHPPRPERQQQPP |
| 1620 | CXorf49B_0 | ADTSRQASFHCKESYLPVPGRFLTSAPRGLTPVAERPAVG |
| | | ELEDSPQKKMQSRAWGKVEVRP |
| 1621 | CXorf49B_1 | RLSVRRGEFSSSDPNIRAPQLPGTSEPSAYSPGGLVPRRHA |
| | | PSGNQQPPVHPPRPERQQQPP |
| 1622 | TNRC18_0 | ALKAKVIQKLEDVSKPPAYAYPATPSSHPTSPPPASPPPTP |
| | | GITRKEEAPENVVEKKDLELE |
| 1623 | TNRC18_1 | AATLEEGNPTDEVPSTPLALEPSSTPGSKKSPPEPVDKRAK |
| | | APKARPAPPQPSPAPPAFTSC |
| 1624 | RNF225 | RPQLVALAPAPGFSWFPPRPPPGSPWAPAWTPRPTGPDLD |
| | | TALPGTAEDALEPEAGPEDPAE |
| 1625 | PCNX3_0 | GLLSSEGPSGKWSLGGRKGLGGSDGEPASGSPKGGTPKSQ |
| | | APLDLSLSLSLSLSPDVSTEAS |
| 1626 | PCNX3_1 | EGPSGKWSLGGRKGLGGSDGEPASGSPKGGTPKSQAPLD |
| | | LSLSLSLSLSPDVSTEASPPRAS |
| 1627 | RGL4 | PRPGQHALTMPALEPAPPLLADLGPALEPESPAALGPPGYL |
| | | HSAPGPAPAPGEGPPPGTVLE |
| 1628 | SALL3_0 | PVEKEAEPMDAEPAGDTRAPRPPPAAPAPPTPAYGAPSTN |
| | | VTLEALLSTKVAVAQFSQGARA |
| 1629 | SALL3_1 | VPTSVGLQLPPTVPGAHGYADSPSATPASRSPQRPSPASSE |
| | | CASLSPGLNHVESGVSATAES |
| 1630 | SALL3_2 | GLQLPPTVPGAHGYADSPSATPASRSPQRPSPASSECASLS |
| | | PGLNHVESGVSATAESPQSLL |
| 1631 | SREBF1_0 | LQLINNQDSDFPGLFDPPYAGSGAGGTDPASPDTSSPGSLS |
| | | PPPATLSSSLEAFLSGPQAAP |
| 1632 | SREBF1_1 | SPGSLSPPPATLSSSLEAFLSGPQAAPSPLSPPQPAPTPLKM |
| | | YPSMPAFSPGPGIKEESVPL |
| 1633 | SHISA7 | DINVPRALVDILRHQAGPGTRPDRARSSSLTPGIGGPDSMP |
| | | PRTPKNLYNTVKTPNLDWRAL |
| 1634 | KIF24 | LPVSSATRHLWLSSSPPDNKPGGDLPALSPSPIRQHPADKL |
| | | PSREADLGEACQSRETVLFSH |
| 1635 | C4orf54 | PETGQYVDVPMTSQQQAVAPMSISVPPLALSPGAYGPTY |
| | | MIYPGFLPTVLPTNALQPTPIAR |
| 1636 | NPIPB8 | PPSVDDNLKECLFVPLPPSPLPPSVDDNLKTPPLATQEAEV |
| | | EKPPKPKRWRVDEVEQSPKPK |
| 1637 | ATXN2L | LKPQPLQQPSQPQQPPPTQQAVARRPPGGTSPPNGGLPGPL |
| | | ATSAAPPGPPAAASPCLGPVA |
| 1638 | HDAC5 | SKEPTPGGLNHSLPQHPKCWGAHHASLDQSSPPQSGPPGT |
| | | PPSYKLPLPGPYDSRDDFPLRK |
| 1639 | ATF7IP | WKETPCILSVNVKNKQDDDLNCEPLSPHNITPEPVSKLPAE |
| | | PVSGDPAPGDLDAGDPASGVL |
| 1640 | RNF217 | APASEQLSPPASPPGAPPVLNPPSTRSSFPSPRLSLPTDSLSP |
| | | DGGSIELEFYLAPEPFSMP |
| 1641 | ZNF831 | REAPWDSAPMASPGLPAASTQPWRKLPEQKSPTAGKPCA |
| | | LQRQQATAAEKPWDAKAPEGRLR |
| 1642 | CBSL | PEDKEAKEPLWIRPDAPSRCTWQLGRPASESPHHHTAPAK |
| | | SPKILPDILKKIGDTPMVRINK |
| 1643 | INPP5E_0 | PPEGRTLQGQLPGAPPAQRAGSPPDAPGSESPALACSTPAT |
| | | PSGEDPPARAAPIAPRPPARP |
| 1644 | INPP5E_1 | LPGAPPAQRAGSPPDAPGSESPALACSTPATPSGEDPPARA |
| | | APIAPRPPARPRLERALSLDD |
| 1645 | PEX1 | HLGKVWIPDDLRKRLNIEMHAVVRITPVEVTPKIPRSLKLQ |
| | | PRENLPKDISEEDIKTVFYSW |
| 1646 | CAPRIN2 | EEQKKQETPKLWPVQLQKEQDPKKQTPKSWTPSMQSEQN |
| | | TTKSWTTPMCEEQDSKQPETPKS |
| 1647 | CBX4 | RCLSETHGEREPCKKRLTARSISTPTCLGGSPAAERPADLP |
| | | PAAALPQPEVILLDSDLDEPI |
| 1648 | XDH | GDGNNPNCCMNQKKDHSVSLSPSLFKPEEFTPLDPTQEPIF |
| | | PPELLRLKDTPRKQLRFEGER |
| 1649 | EPAS1_0 | ATELRSHSTQSEAGSLPAFTVPQAAAPGSTTPSATSSSSSCS |
| | | TPNSPEDYYTSLDNDLKIEV |
| 1650 | EPAS1_1 | VPNDKFTQNPMRGLGHPLRHLPLPQPPSAISPGENSKSRFP |
| | | PQCYATQYQDYSLSSAHKVSG |
| 1651 | SHANK3_0 | GLVPPPEEFANGVLLATPLAGPGPSPTTVPSPASGKPSSEPP |
| | | PAPESAADSGVEEADTRSSS |
| 1652 | SHANK3_1 | GELTDTHTSFADGHTFLLEKPPVPPKPKLKSPLGKGPVTFR |
| | | DPLLKQSSDSELMAQQHHAAS |
| 1653 | ATF6 | PSAQPVLAVAGGVTQLPNHVVNVVPAPSANSPVNGKLSV |
| | | TKPVLQSTMRNVGSDIAVLRRQQ |
| 1654 | BCOR | KASNPEPSFKANENGLPPSSIFLSPNEAFRSPPIPYPRSYLPY |
| | | PAPEGIAVSPLSLHGKGPV |
| 1655 | CCP110 | SDERGAHIMNSTCAAMPKLHEPYASSQCIASPNFGTVSGL |
| | | KPASMLEKNCSLQTELNKSYDV |
| 1656 | MMP9 | GPPLHKDDVNGIRHLYGPRPEPEPRPPTTTTPQPTAPPTVC |
| | | PTGPPTVHPSERPTAGPTGPP |
| 1657 | BCL11B_0 | LNPMAIDSPAMDFSRRLRELAGNSSTPPPVSPGRGNPMHR |
| | | LLNPFQPSPKSPFLSTPPLPPM |
| 1658 | BCL11B_1 | AGNSSTPPPVSPGRGNPMHRLLNPFQPSPKSPFLSTPPLPPM |
| | | PPGGTPPPQPPAKSKSCEFC |
| 1659 | BCL11B_2 | TPPPVSPGRGNPMHRLLNPFQPSPKSPFLSTPPLPPMPPGGT |
| | | PPPQPPAKSKSCEFCGKTFK |
| 1660 | BCL11B_3 | PMHRLLNPFQPSPKSPFLSTPPLPPMPPGGTPPPQPPAKSKS |
| | | CEFCGKTFKFQSNLIVHRRS |
| 1661 | RB1 | DSIIVFYNSVFMQRLKTNILQYASTRPPTLSPIPHIPRSPYKF |
| | | PSSPLRIPGGNIYISPLKS |
| 1662 | AHSG_0 | GAEVAVTCMVFQTQPVSSQPQPEGANEAVPTPVVDPDAP |
| | | PSPPLGAPGLPPAGSPPDSHVLL |
| 1663 | AHSG_1 | GANEAVPTPVVDPDAPPSPPLGAPGLPPAGSPPDSHVLLA |
| | | APPGHQLHRAHYDLRHTFMGVV |
| 1664 | TCTN3 | TDGGTLQSPSEATATRPAVPGLPTVVPTLVTPSAPGNRTV |
| | | DLFPVLPICVCDLTPGACDINC |
| 1665 | NR2F2 | QDEVPGSQGSQASQAPPVPGPPPGAPHTPQTPGQGGPAST |
| | | PAQTAAGGQGGPGGPGSDKQQQ |
| 1666 | KHDRBS1 | PSVRQTPSRQPPLPHRSRGGGGGSRGGARASPATQPPPLLP |
| | | PSATGPDATVGGPAPTPLLPP |
| 1667 | ARRB1 | SSDVAVELPFTLMHPKPKEEPPHREVPENETPVDTNLIELD |
| | | TNDDDIVFEDFARQRLKGMKD |
| 1668 | TFAP2B | HDGVPSHSSRLSQLGSVSQGPYSSAPPLSHTPSSDFQPPYFP |
| | | PPYQPLPYHQSQDPYSHVND |
| 1669 | KSR2_0 | IQWPTTETGKENNPVCPPEPTPWIRTHLSQSPRVPSKCVQH |
| | | YCHTSPTPGAPVYTHVDRLTV |
| 1670 | KSR2_1 | RSLPPSPRQRHAVRTPPRTPNIVTTVTPPGTPPMRKKNKLK |
| | | PPGTPPPSSRKLIHLIPGFTA |
| 1671 | KSR2_2 | RQQKNFNLPASHYYKYKQQFIFPDVVPVPETPTRAPQVIL |
| | | HPVTSNPILEGNPLLQIEVEPT |
| 1672 | TNS1_0 | SGYIPSGHSLGTPEPAPRASLESVPPGRSYSPYDYQPCLAG |
| | | PNQDFHSKSPASSSLPAFLPT |
| 1673 | TNS1_1 | LPAFLPTTHSPPGPQQPPASLPGLTAQPLLSPKEATSDPSRT |
| | | PEEEPLNLEGLVAHRVAGVQ |
| 1674 | TNS1_2 | SASGYQAPSTPSFPVSPAYYPGLSSPATSPSPDSAAFRQGSP |
| | | TPALPEKRRMSVGDRAGSLP |
| 1675 | ZEB2 | SNSRSPSLERSSKPLAPNSNPPTKDSLLPRSPVKPMDSITSPS |
| | | IAELHNSVTNCDPPLRLTK |
| 1676 | CREBBP_0 | QGQVPGAALPNPLNMLGPQASQLPCPPVTQSPLHPTPPPA |
| | | STAAGMPSLQHTTPPGMTPPQP |
| 1677 | CREBBP_1 | GAALPNPLNMLGPQASQLPCPPVTQSPLHPTPPPASTAAG |
| | | MPSLQHTTPPGMTPPQPAAPTQ |
| 1678 | CREBBP_2 | AQLMRRRMATMNTRNVPQQSLPSPTSAPPGTPTQQPSTPQ |
| | | TPQPPAQPQPSPVSMSPAGFPS |
| 1679 | CREBBP_3 | MATMNTRNVPQQSLPSPTSAPPGTPTQQPSTPQTPQPPAQP |
| | | QPSPVSMSPAGFPSVARTQPP |
| 1680 | CREBBP_4 | MNTRNVPQQSLPSPTSAPPGTPTQQPSTPQTPQPPAQPQPS |
| | | PVSMSPAGFPSVARTQPPTTV |
| 1681 | CREBBP_5 | GQQIATSLSNQVRSPAPVQSPRPQSQPPHSSPSPRIQPQPSP |
| | | HHVSPQTGSPHPGLAVTMAS |
| 1682 | CREBBP_6 | QVRSPAPVQSPRPQSQPPHSSPSPRIQPQPSPHHVSPQTGSP |
| | | HPGLAVTMASSIDQGHLGNP |
| 1683 | CREBBP_7 | APVQSPRPQSQPPHSSPSPRIQPQPSPHHVSPQTGSPHPGLA |
| | | VTMASSIDQGHLGNPEQSAM |
| 1684 | GBF1_0 | IPSELGACDFEKPESPRAASSSSPGSPVASSPSRLSPTPDGPP |
| | | PLAQPPLILQPLASPLQVG |
| 1685 | GBF1_1 | GACDFEKPESPRAASSSSPGSPVASSPSRLSPTPDGPPPLAQ |
| | | PPLILQPLASPLQVGVPPMT |
| 1686 | GBF1_2 | CDFEKPESPRAASSSSPGSPVASSPSRLSPTPDGPPPLAQPPL |
| | | ILQPLASPLQVGVPPMTLP |
| 1687 | ESRP2 | QATPTLIPTETAALYPSSALLPAARVPAAPTPVAYYPGPAT |
| | | QLYLNYTAYYPSPPVSPTTVG |
| 1688 | FGFR1 | PYWTSPEKMEKKLHAVPAAKTVKFKCPSSGTPNPTLRWL |
| | | KNGKEFKPDHRIGGYKVRYATWS |
| 1689 | FNDC1 | IVAMPTTSKADVEQNTEDNGKPEKPEPSSPSPRAPASSQHP |
| | | SVPASPQGRNAKDLLLDLKNK |
| 1690 | LCAT | PWQWVTLLLGLLLPPAAPFWLLNVLFPPHTTPKAELSNHT |
| | | RPVILVPGCLGNQLEAKLDKPD |
| 1691 | COL4A5 | IKGSVGDPGLPGLPGTPGAKGQPGLPGFPGTPGPPGPKGIS |
| | | GPPGNPGLPGEPGPVGGGGHP |
| 1692 | FGD1 | PGQSLEPHPEGPQRLRSDPGPPTETPSQRPSPLKRAPGPKPQ |
| | | VPPKPSYLQMPRMPPPLEPI |
| 1693 | PIK3R1 | IGWLNGYNETTGERGDFPGTYVEYIGRKKISPPTPKPRPPR |
| | | PLPVAPGSSKTEADVEQQALT |
| 1694 | EP300_0 | MQIQRAAETQRQMAHVQIFQRPIQHQMPPMTPMAPMGM |
| | | NPPPMTRGPSGHLEPGMGPTGMQQ |
| 1695 | EP300_1 | GQQIPNSLSNQVRSPQPVPSPRPQSQPPHSSPSPRMQPQPSP |
| | | HHVSPQTSSPHPGLVAAQAN |
| 1696 | EP300_2 | QVRSPQPVPSPRPQSQPPHSSPSPRMQPQPSPHHVSPQTSSP |
| | | HPGLVAAQANPMEQGHFASP |
| 1697 | EP300_3 | QPVPSPRPQSQPPHSSPSPRMQPQPSPHHVSPQTSSPHPGLV |
| | | AAQANPMEQGHFASPDQNSM |
| 1698 | FOXM1_0 | VGGLDFSPVQTSQGASDPLPDPLGLMDLSTTPLQSAPPLES |
| | | PQRLLSSEPLDLISVPFGNSS |
| 1699 | FOXM1_1 | TSQGASDPLPDPLGLMDLSTTPLQSAPPLESPQRLLSSEPLD |
| | | LISVPFGNSSPSDIDVPKPG |
| 1700 | ACD | ICSAPATLTPRSPHASRTPSSPLQSCTPSLSPRSHVPSPHQAL |
| | | VTRPQKPSLEFKEFVGLPC |
| 1701 | SON | SETAETFDSMRASGHVASEVSTSLLVPAVTTPVLAESILEP |
| | | PAMAAPESSAMAVLESSAVTV |
| 1702 | HTT | INICAHVLDDVAPGPAIKAALPSLTNPPSLSPIRRKGKEKEP |
| | | GEQASVPLSPKKGSEASAAS |
| 1703 | PHLPP1 | APGAFGGPPRAPPADLPLPVGGPGGWSRRASPAPSDSSPG |
| | | EPFVGGPVSSPRAPRPVVSDTE |
| 1704 | NAF1 | DFGVGEGPAAPSPGSAPVPGTQPPLQSFEGSPDAGQTVEV |
| | | KPAGEQPLQPVLNAVAAGTPAP |
| 1705 | ERBB2 | PSETDGYVAPLTCSPQPEYVNQPDVRPQPPSPREGPLPAAR |
| | | PAGATLERPKTLSPGKNGVVK |
| 1706 | DAZAP1 | VKFKDPNCVGTVLASRPHTLDGRNIDPKPCTPRGMQPERT |
| | | RPKEGWQKGPRSDNSKSNKIFV |
| 1707 | E2F8 | VAPLDPPVNAEMELTAPSLIQPLGMVPLIPSPLSSAVPLILP |
| | | QAPSGPSYAIYLQPTQAHQS |
| 1708 | PC | RPAQNRAQKLLHYLGHVMVNGPTTPIPVKASPSPTDPVVP |
| | | AVPIGPPPAGFRDILLREGPEG |
| 1709 | TMIGD2 | QSIYSTSFPQPAPRQPHLASRPCPSPRPCPSPRPGHPVSMVR |
| | | VSPRPSPTQQPRPKGFPKVG |
| 1710 | MAPT_0 | PAKTPPAPKTPPSSGEPPKSGDRSGYSSPGSPGTPGSRSRTP |
| | | SLPTPPTREPKKVAVVRTPP |
| 1711 | MAPT_1 | PPSSGEPPKSGDRSGYSSPGSPGTPGSRSRTPSLPTPPTREPK |
| | | KVAVVRTPPKSPSSAKSRL |
| 1712 | MAPT_2 | EPPKSGDRSGYSSPGSPGTPGSRSRTPSLPTPPTREPKKVAV |
| | | VRTPPKSPSSAKSRLQTAPV |
| 1713 | KCNQ2_0 | LIPPLNQLELLRNLKSKSGLAFRKDPPPEPSPSKGSPCRGPL |
| | | CGCCPGRSSQKVSLKDRVFS |
| 1714 | KCNQ2_1 | NQLELLRNLKSKSGLAFRKDPPPEPSPSKGSPCRGPLCGCC |
| | | PGRSSQKVSLKDRVFSSPRGV |
| 1715 | MBNL2 | SFAPYLAPVTPGVGLVPTEILPTTPVIVPGSPPVTVPGSTAT |
| | | QKLLRTDKLEVCREFQRGNC |
| 1716 | FN1 | PGTSGQQPSVGQQMIFEEHGFRRTTPPTTATPIRHRPRPYPP |
| | | NVGEEIQIGHIPREDVDYHL |
| 1717 | KLF5 | TAVKQFQGMPPCTYTMPSQFLPQQATYFPPSPPSSEPGSPD |
| | | RQAEMLQNLTPPPSYAATIAS |
| 1718 | uncharacterized_ | VIRALGPLVPPTEGGLWSDQVSWPLWEDVKTPEPGEPGSP |
| | LOC101060588_0 | LPASPHPPLQPPAFPDPPIRSP |
| 1719 | uncharacterized_ | TPEPGEPGSPLPASPHPPLQPPAFPDPPIRSPDPAVSSAHSFP |
| | LOC101060588_1 | APRLAWSCVLHSPLSLPLS |
| 1720 | translation_initiation_ | PGSLLPTPASLWQAQCPRHMHSWSSAPGRLTPHPPGPAPG |
| | factor_IF-2-like | TKLATGATSSACSRPQGRPCPQ |
| 1721 | putative_uncharacterized_ | SAQAGPPETAHAADPQPRGPQAPPRLPPSLSPERVHPGQPA |
| | protein_MGC34800 | APAEPAPGAPALRSGPSQPRG |
| 1722 | uncharacterized_ | SLPWPLRAAPLYAGRSGQGGEPGARAPRQGTPEPGELDQE |
| | LOC100507221 | RPPAPPEQGRRAAAAVAKSGGG |
| 1723 | basic_proline- | SAGNKENARTWRRSEGGLAGPPLAKAPRSHSPPGCSPHG |
| | rich protein-like_0 | QSLPPRRRTPPSQLTGSARSRRP |
| 1724 | basic_proline- | ENARTWRRSEGGLAGPPLAKAPRSHSPPGCSPHGQSLPPR |
| | rich protein-like_1 | RRTPPSQLTGSARSRRPGSPFR |
| 1725 | basic proline- | RSPGAGGVQGGGAGGIPAPRAPRPPPSGAPSPTHVEPPRPR |
| | rich protein-like_2 | RPAPTREGTRASPHTRASRSR |
| 1726 | uncharacterized_ | CWDSHLPFRKKGAAPAPGCGDRIDTVPTSATPNGRTPGRG |
| | LOC107987269 | ALLAAPILSQPCHFQSCQHPSQ |
| 1727 | sine_oculis- | GCLSKGSQRSLTPSWSPSVSPGSEADSSWGTPSTPPRPHSP |
| | binding_protein_ | PSLPRPSPSPWVQARPGIPPP |
| | homolog_0 | |
| 1728 | sine_oculis- | SPGSEADSSWGTPSTPPRPHSPPSLPRPSPSPWVQARPGIPP |
| | binding_protein_ | PSEQTLFKGLWRLEGIEPPP |
| | homolog_1 | |
| 1729 | mucin-1-like_0 | PAGSPAAPLQTATSVPPWVSSCTTSNCNISSPLGLQQHGPQ |
| | | PGTSAPPNPGLQLHSPQPGTS |
| 1730 | mucin-1-like_1 | NCNISSPLGLQQHGPQPGTSAPPNPGLQLHSPQPGTSAPPN |
| | | PGLQLHGPQTGTSAPCRVSSC |

TABLE 2
List of speckle targeting motif containing proteins according to x(30)-[TSED]P-
x(30) pattern. Proteins with more than one speckle targeting motif are designated by
ProteinName_[0 - number of motifs minus one]. See Table for SEQ ID numbers of
repeated peptides.

| SEQ | | |
|---|---|---|
| ID | | |
| NO: | Name: | Sequence: |
| | MUC17_0 | IPVITSTEASSSPTTAEGTSIPTSTYTEGSTPLTSTPAST |
| | | MPVATSEMSTLSITPVDTSTLV |
| | MUC17_1 | STEASSSPTTAEGTSIPTSTYTEGSTPLTSTPASTMPV |
| | | ATSEMSTLSITPVDTSTLVTTSTE |
| | MUC17_2 | TPVTNSTEARSSPTTSEGTSMPTSTPGEGSTPLTSMP |
| | | DSTTPVVSSEARTLSATPVDTSTPV |
| | MUC17_3 | TQVATSTEASSPPPTAEVTSMPTSTPGERSTPLTSMP |
| | | VRHTPVASSEASTLSTSPVDTSTPV |
| | MUC17_4 | TPVTTSTEACSSPTTSEGTSMPNSNPSEGTTPLTSIPV |
| | | STTPVVSSEASTLSATPVDTSTPG |
| | MUC17_5 | TPGTTSAEATSSPTTAEGISIPTSTPSEGKTPLKSIPVS |
| | | NTPVANSEASTLSTTPVDSNSPV |
| | MUC17_6 | TPVTTSTEARSSPTTSEGTSMPNSTPSEGTTPLTSIPV |
| | | STTPVLSSEASTLSATPIDTSTPV |
| | MUC17_7 | TPVTNSTEARSSPTTSEGTSMPTSTPSEGSTPFTSMPV |
| | | STMPVVTSEASTLSATPVDTSTPV |
| | MUC17_8 | TPVTTYSQAGSSPTTADDTSMPTSTYSEGSTPLTSVP |
| | | VSTMPVVSSEASTHSTTPVDTSTPV |
| | MUC17_9 | TPVTTSTEASSSPTTAEGTSIPTSPPSEGTTPLASMPV |
| | | STTPVVSSEAGTLSTTPVDTSTPM |
| | MUC17_10 | SPVVTSTEISSSATSAEGTSMPTSTYSEGSTPLRSMPV |
| | | STKPLASSEASTLSTTPVDTSIPV |
| | MUC17_11 | IPVTTSTEASSSPTTAEVTSMPTSTPSETSTPLTSMPV |
| | | NHTPVASSEAGTLSTTPVDTSTPV |
| | MUC17_12 | TPVTTSTEASSSPTTAEGTGIPISTPSEGSTPLTSIPVST |
| | | TPVAIPEASTLSTTPVDSNSPV |
| | MUC17_13 | SPVVTSTEVSSSPTPAEGTSMPISTYSEGSTPLTGVPV |
| | | STTPVTSSAISTLSTTPVDTSTPV |
| | MUC17_14 | STPVTTSTEATSSTTAEGTSIPTSTPSEGMTPLTSVPV |
| | | SNTPVASSEASILSTTPVDSNTPL |
| | MUC17_15 | TPVTTSTEASLSPTTAEGTSIPTSSPSEGTTPLASMPV |
| | | STTPVVSSEVNTLSTTPVDSNTLV |
| | MUC17_16 | TLVTTSTEASSSPTIAEGTSLPTSTTSEGSTPLSIMPLS |
| | | TTPVASSEASTLSTTPVDTSTPV |
| | MUC17_17 | TPVTTSSPTNSSPTTAEVTSMPTSTAGEGSTPLTNMP |
| | | VSTTPVASSEASTLSTTPVDSNTFV |
| 1731 | TGOLN2 | HAFKTESGEETDLISPPQEEVKSSEPTEDVEPKEAED |
| | | DDTGPEEGSPPKEEKEKMSGSASSE |
| | MYO15B_0 | HRLALRLAGLAGLGGMPRASPGGRSPQVPTSPVPG |
| | | DPFDQEDETPDPKFAVVFPRIHRAGRA |
| | MYO15B_1 | AFLRKIDPKDEALAKLGINGAHSSPPMLSPSPGKGPP |
| | | PAVAPRPKAPLQLGPSSSIKEKQGP |
| | FAM178B | RPCSPASAPAPTSPKKPKIQAPGETFPTDWSPPPVEFL |
| | | NPRVLQASREAPAQRWVGVVGPQG |
| 1732 | INPP5J_0 | GSPPCIQTSPDPRLSPSFRARPEALHSSPEDPVLPRPP |
| | | QTLPLDVGQGPSEPGTHSPGLLSP |
| 1733 | INPP5J_1 | RPEALHSSPEDPVLPRPPQTLPLDVGQGPSEPGTHSP |
| | | GLLSPTFRPGAPSGQTVPPPLPKPP |
| | INPP5J_2 | HSSPEDPVLPRPPQTLPLDVGQGPSEPGTHSPGLLSP |
| | | TFRPGAPSGQTVPPPLPKPPRSPSR |
| | INPP5J_3 | DPVLPRPPQTLPLDVGQGPSEPGTHSPGLLSPTFRPG |
| | | APSGQTVPPPLPKPPRSPSRSPSHS |
| | COL15A1 | VAEILEAVTYTQASPKEAKVEPINTPPTPSSPFEDME |
| | | LSGEPVPEGTLETTNMSIIQHSSPK |
| | SH3RF1 | PTAAARISELSGLSCSAPSQVHISTTGLIVTPPPSSPVT |
| | | TGPSFTFPSDVPYQAALGTLNPP |
| 1734 | FMN2 | GAGEAPGSPDTEQALSALSDLPESLAAEPREPQQPPS |
| | | PGGLPVSEAPSLPAAQPAAKDSPSS |
| | EZHIP | DENPSCGTGSERLAFQSRSGSPDPEVPSRASPPVWH |
| | | AVRMRASSPSPPGRFFLPIPQQWDES |
| | CTAGE1 | EFKIKLLEKDPYGLDVPNTAFGRQHSPYGPSPLGWP |
| | | SSETRASLYPPTLLEGPLRLSPLLPR |
| | BPTF_0 | PTHAQSSKPQVAAQSQPQSNVQGQSPVRVQSPSQTR |
| | | IRPSTPSQLSPGQQSQVQTTTSQPIP |
| | BPTF_1 | QPQSNVQGQSPVRVQSPSQTRIRPSTPSQLSPGQQSQ |
| | | VQTTTSQPIPIQPHTSLQIPSQGQP |
| | NRXN3 | KMNNRDLKPQPDIVLLPLPTAYELDSTKLKSPLITSP |
| | | MFRNVPTANPTEPGIRRVPGASEVI |
| | ANKHD1-EIF4EBP3 | PHFALLAAQTMQQIRHPRLPMAQFGGTFSPSPNTW |
| | | GPFPVRPVNPGNTNSSPKHNNTSRLPN |
| | putative_UPF0607_protein_ | LCLIPRNTGTPQRVLRPVVWSPPSRKKPVLSPHNSIM |
| | FLJ37424 | FGHLSPVRIPCLRGKFNLQLPSLDD |
| 1735 | C1orf94_0 | KVPDNKNVLDKTRVTKDFLQDNLFSGPGPKEPTGL |
| | | SPFLLLPPRPPPARPDKLPELPAQKRQ |
| | C1orf94_1 | KNVLDKTRVTKDFLQDNLFSGPGPKEPTGLSPFLLL |
| | | PPRPPPARPDKLPELPAQKRQLPVFA |
| | ITIH6_0 | KPGSLSHQNPDILPTNSRTQVPPVKPGIPASPKADTV |
| | | KCVTPLHSKPGAPSHPQLGALTSQA |
| | ITIH6_1 | LSKTPKILLSLKPSAPPHQISTSISLSKPETPNPHMPQT |
| | | PLPPRPDRPRPPLPESLSTFPNT |
| | KIAA1614 | GSINEEQPARDGGPRLPRPPAPGREYCNRGSPWPPE |
| | | AEWTLPDHDRGPLLGPSSLQQSPIHG |
| | KRTAP10-10 | CTDSWRVVDCPESCCEPCCCAPAPSLTLVCTPVSCV |
| | | SSPCCQTACEPSACQSGYTSSCTTPC |
| | IFITM10 | LGDPASTTDGAQEARVPLDGAFWIPRPPAGSPKGCF |
| | | ACVSKPPALQAPAAPAPEPSASPPMA |
| | MS4A15 | GLCPPPAILPTSMCQPPGIMQFEEPPLGAQTPRATQP |
| | | PDLRPVETFLTGEPKVLGTVQILIG |
| 1736 | SP5_0 | HSPLALLAATCSRIGQPGAAAPPDFLQVPYDPALGS |
| | | PSRLFHPWTADMPAHSPGALPPPHPS |
| | SP5_1 | PQKTHLQPSFGAAHELPLTPPADPSYPYEFSPVKMLP |
| | | SSMAALPASCAPAYVPYAAQAALPP |
| | FOXE1 | AARPPYPGAVYAGYAPPSLAAPPPVYYPAASPGPCR |
| | | VFGLVPERPLSPELGPAPSGPGGSCA |
| | PRICKLE2 | EYAWVPPGLKPEQVHQYYSCLPEEKVPYVNSPGEK |
| | | LRIKQLLHQLPPHDNEVRYCNSLDEEE |
| | C7orf26_0 | LCTRDDLRTLCSRLPHNNLLQLVISGPVQQSPHAAL |
| | | PPGFYPHIHTPPLGYGAVPAHPAAHP |
| | C7orf26_1 | HNNLLQLVISGPVQQSPHAALPPGFYPHIHTPPLGYG |
| | | AVPAHPAAHPALPTHPGHTFISGVT |
| | MAGEB17_0 | EKRRQARGEDQCLGGAQATAAEKEKLPSSSSPACQ |
| | | SPPQSFPNAGIPQESQRASYPSSPASA |
| | MAGEB17_1 | ARGEDQCLGGAQATAAEKEKLPSSSSPACQSPPQSF |
| | | PNAGIPQESQRASYPSSPASAVSLTS |
| | ATP6V1FNB | ARLPLKLPTLHPKAPLSPPPAPKSAPSKVPSPVPEAPF |
| | | QSEMYPVPPITRALLYEGISHDFQ |
| | PCDH9 | ATDGGQPPRSSTAKVTINVMDVNDNSPVVISPPSNT |
| | | SFKLVPLSAIPGSVVAEVFAVDVDTG |
| | FAM131C | YLQDSLPSGPSQDDSLQAFSSPSPSPDSCPSPEEPPST |
| | | AGIPQPPSPELQHRRRLPGAQGPE |
| | FAM221B | SAEDLQENHISESFLKPSTSETPLEPHTSESPLVPSPSQ |
| | | IPLEAHSPETHQEPSISETPSET |
| 1737 | TOX3_0 | FFAASEQTFHTPSLGDEEFEIPPITPPPESDPALGMPD |
| | | VLLPFQALSDPLPSQGSEFTPQFP |
| | TOX3_1 | QQLQQQLQQRLQLQQLQHMQHQSQPSPRQHSPVAS |
| | | QITSPIPAIGSPQPASQQHQSQIQSQT |
| | MAMSTR | EQISDPDPWISASDPPLAPALPSGTAPFLFSPGVLLPE |
| | | PEYCPPWRSPKKESPKISQRWRES |
| | ZAN | CAQAGQAPAWRNRTFCPMRCPPGSSYSPCSSPCPDT |
| | | CSSINNPRDCPKALPCAESCECQKGH |
| | PCLO_0 | RPQTKQADIVRGESVKPSLPSPSKPPIQQPTPGKPPA |
| | | QQPGHEKSQPGPAKPPAQPSGLTKP |
| | PCLO_1 | KTPAQQPGPAKPPTQQVGTPKPLAQQPGLQSPAKAP |
| | | GPTKTPVQQPGPGKIPAQQAGPGKTS |
| | PCLO_2 | KPPTQQVGTPKPLAQQPGLQSPAKAPGPTKTPVQQP |
| | | GPGKIPAQQAGPGKTSAQQTGPTKPP |
| 1738 | PCLO_3 | TSAVSKSSPQPQQTSPKKDAAPKQDLSKAPEPKKPP |
| | | PLVKQPTLHGSPSAKAKQPPEADSLS |
| 1739 | IER5L | RGQPLEPLQPGPAPLPLPLPPPAPAALCPRDPRAPAA |
| | | CSAPPGAAPPAAAASPPASPAPASS |
| | C22orf23 | IMDIMKRGDALPLQCSPTSSQRVLPSKQIASPIYLPPI |
| | | LAARPHLRPANMCQANGAYSREQF |
| | HSFX1 | RNSRGQDHGLERVPFPPQLQSETYLHPADPSPAWD |
| | | DPGSTGSPNLRLLTEEIAFQPLAEEAS |
| | FAM13C | RNLLCEQPTVPRENGKPEAAGPEPSSSGEETPDAAL |
| | | TCLKERREQLPPQEDSKVTKQDKNLI |
| | THAP8_0 | PLQKNTPLPQSPAIPVSGPVRLVVLGPTSGSPKTVAT |
| | | MLLTPLAPAPTPERSQPEVPAQQAQ |
| | THAP8_1 | SPAIPVSGPVRLVVLGPTSGSPKTVATMLLTPLAPAP |
| | | TPERSQPEVPAQQAQTGLGPVLGAL |
| 1740 | PRR27_0 | PPLPPRGFPFVPPSRFFSAAAAPAAPPIAAEPAAAAPL |
| | | TATPVAAEPAAGAPVAAEPAAEAP |
| | PRR27_1 | VPPSRFFSAAAAPAAPPIAAEPAAAAPLTATPVAAEP |
| | | AAGAPVAAEPAAEAPVGAEPAAEAP |
| 1741 | PRR27_2 | FFSAAAAPAAPPIAAEPAAAAPLTATPVAAEPAAGA |
| | | PVAAEPAAEAPVGAEPAAEAPVAAEP |
| 1742 | PRR27_3 | PPIAAEPAAAAPLTATPVAAEPAAGAPVAAEPAAEA |
| | | PVGAEPAAEAPVAAEPAAEAPVGVEP |
| 1743 | PRR27_4 | APLTATPVAAEPAAGAPVAAEPAAEAPVGAEPAAE |
| | | APVAAEPAAEAPVGVEPAAEEPSPAEP |
| 1744 | PRR27_5 | EPAAGAPVAAEPAAEAPVGAEPAAEAPVAAEPAAE |
| | | APVGVEPAAEEPSPAEPATAKPAAPEP |
| 1745 | PRR27_6 | EPAAEAPVGAEPAAEAPVAAEPAAEAPVGVEPAAE |
| | | EPSPAEPATAKPAAPEPHPSPSLEQAN |
| 1746 | RINL | DTPGKVLSIVNQLYLETHRGWGREQTPQETEPEAA |
| | | QRHDPAPRNPAPHGVSWVKGPLSPEVD |
| | LRRN4 | VLEPDISAASTPLASKLLGPFPTSWDRSISSPQPGQRT |
| | | HATPQAPNPSLSEGEIPVLLLDDY |
| | KDF1 | QRLKSTMGSSFSYPDVKLKGIPVYPYPRATSPAPDA |
| | | DSCCKEPLADPPPMRHSLPSTFASSP |
| 1747 | FNDC10 | PDVHDSVLYRLCLQPLPLRAGPAAAAPETPEPAECV |
| | | EFTAEPAGMQDIVVAMTAVGGSICVM |
| 1748 | C1QL1_0 | SGAPPPSTLVQGPQGKPGRTGKPGPPGPPGDPGPPGP |
| | | VGPPGEKGEPGKPGPPGLPGAGGSG |
| 1749 | C1QL1_1 | KPGRTGKPGPPGPPGDPGPPGPVGPPGEKGEPGKPG |
| | | PPGLPGAGGSGAISTATYTTVPRVAF |
| | NEXMIF | INGVKENDSEDQDVAMKSFAALEAAAPIQPTPVAQ |
| | | KETLMYPRGLLPLPSKKPCMQSPPSPL |
| | KLHDC7B | PGGGWPWVSREVPGTRSFGPAPDSTRPWLESPPQG |
| | | RPLSSQGPGATGAYDAGEAGADSSRDN |
| 1750 | C19orf67_0 | TEQWFEGSLPLDPGETPPPDALEPGTPPCGDPSRSTP |
| | | PGRPGNPSEPDPEDAEGRLAEARAS |
| | C19orf67_1 | EGSLPLDPGETPPPDALEPGTPPCGDPSRSTPPGRPG |
| | | NPSEPDPEDAEGRLAEARASTSSPK |
| 1751 | CYSRT1 | RPDLGQQLEVASTCSSSSEMQPLPVGPCAPEPTHLL |
| | | QPTEVPGPKGAKGNQGAAPIQNQQAW |
| | RAB44_0 | TAHSELPQQDSLLVSLPSATPQAQVEAEGPTPGKSA |
| | | PPRGSPPRGAQPGAGAGPQEPTQTPP |
| | RAB44_1 | SLLVSLPSATPQAQVEAEGPTPGKSAPPRGSPPRGAQ |
| | | PGAGAGPQEPTQTPPTMAEQEAQPR |
| 1752 | C16orf90 | LGPRNSLCSALLEARLPRDSLGSSASSSSMDPDKGA |
| | | LPQPSPSRLRPKRSWGTWEEAMCPLC |
| | ZNF341_0 | SGTVEIQALGMQPYPPLEVPNQCVEPPVYPTPTVYS |
| | | PGKQGFKPKGPNPAAPMTSATGGTVA |
| | ZNF341_1 | IQALGMQPYPPLEVPNQCVEPPVYPTPTVYSPGKQG |
| | | FKPKGPNPAAPMTSATGGTVATFDSP |
| 1753 | RTL10_0 | EQQLTKESTPGPKEPPVLPSSTCSSKPGPVEPASSQPE |
| | | EAAPTPVPRLSESANPPAQRPDPA |
| | RTL10_1 | KEPPVLPSSTCSSKPGPVEPASSQPEEAAPTPVPRLSE |
| | | SANPPAQRPDPAHPGGPKPQKTEE |
| 1754 | BNIP5 | PLCVGGHRPSTSSSLDPEDLECREPLPAEGEPVVISE |
| | | APSQARGHTPEGAPQLSGACESKEI |
| | IQCN_0 | KTLLQTYPVVSVTLPQTYPASTMTTTPPKTSPVPKV |
| | | TIIKTPAQMYPGPTVTKTAPHTCPMP |
| | IQCN_1 | SVTLPQTYPASTMTTTPPKTSPVPKVTIIKTPAQMYP |
| | | GPTVTKTAPHTCPMPTMTKIQVHPT |
| 1755 | FREM3 | TPRQLLVALACLLLSRPALQGRASSLGTEPDPALYL |
| | | PARGALDGTRPDGPSVLIANPGLRVP |
| | ZNF653 | SPVGSSGLITQEGVHIPFDVHHVESLAEQGTPLCSNP |
| | | AGNGPEALETVVCVPVPVQVGAGPS |
| | KRTAP10-11 | QVDDCPESCCEPPCSAPSCCAPAPSLSLVCTPVSCVS |
| | | SPCCQAACEPSACQSGCTSSCTPSC |
| 1756 | TTBK1_0 | VPLAEEEDFDSKEWVIIDKETELKDFPPGAEPSTSGT |
| | | TDEEPEELRPLPEEGEERRRLGAEP |
| 1757 | TTBK1_1 | SKEWVIIDKETELKDFPPGAEPSTSGTTDEEPEELRPL |
| | | PEEGEERRRLGAEPTVRPRGRSMQ |
| | TTBK1_2 | TNSLPNGPALADGPAPVSPLEPSPEKVATISPRRHAM |
| | | PGSRPRSRIPVLLSEEDTGSEPSGS |
| | CCDC184 | GRDPEDEEEEEEEKEMPSPATPSSHCERPESPCAGLL |
| | | GGDGPLVEPLDMPDITLLQLEGEAS |
| 1758 | PRR15 | GPWWKSLTNSRKKSKEAAVGVPPPAQPAPGEPTPP |
| | | APPSPDWTSSSRENQHPNLLGGAGEPP |
| 1759 | LAMB4_0 | GQHCDRCRPLFYRDPLKTISDPYACIPCECDPDGTIS |
| | | GGICVSHSDPALGSVAGQCLCKENV |
| 1760 | LAMB4_1 | SVAGQCLCKENVEGAKCDQCKPNHYGLSATDPLGC |
| | | QPCDCNPLGSLPFLTCDVDTGQCLCLS |
| | UBQLN3_0 | QSLGTYLQGTASALSQSQEPPPSVNRVPPSSPSSQEP |
| | | GSGQPLPEESVAIKGRSSCPAFLRY |
| 1761 | UBQLN3_1 | YLQGTASALSQSQEPPPSVNRVPPSSPSSQEPGSGQP |
| | | LPEESVAIKGRSSCPAFLRYPTENS |
| | UBQLN3_2 | SSTGHSTNLPDLVSGLGDSANRVPFAPLSFSPTAAIP |
| | | GIPEPPWLPSPAYPRSLRPDGMNPA |
| 1762 | UBQLN3_3 | DLVSGLGDSANRVPFAPLSFSPTAAIPGIPEPPWLPSP |
| | | AYPRSLRPDGMNPAPQLQDEIQPQ |
| 1763 | C10orf82 | VLQHEELLPKYPDFSIPDGSCPALGRPLREDPKTPLT |
| | | CGCAQRPSIPCSGKMYLEPLSSAKY |
| | PRDM8 | STPAAASPVGAEKLLAPRPGGPLPSRLEGGSPARGS |
| | | AFTSVPQLGSAGSTSGGGGTGAGAAG |
| | PCBP4 | GTPSSAPADLPAPFSPPLTALPTAPPGLLGTPYAISLS |
| | | NFIGLKPMPFLALPPASPGPPPGL |
| 1764 | MARVELD3 | GARGLTWDAAAPPGPAPWEAPEPPQPQRKGDPGRR |
| | | RPESEPPSERYLPSTPRPGREEVEYYQ |
| | RNF222_0 | KSSQTLAVPVGLPSVPPLDSLGHTNPLAASSPAWRP |
| | | PPGQARPPGSPGQSAQLPLDLLPSLP |
| | RNF222_1 | PPLDSLGHTNPLAASSPAWRPPPGQARPPGSPGQSA |
| | | QLPLDLLPSLPRESQIFVISRHGMPL |
| 1765 | PARP8 | QVVDLLVSMCRSALESPRKVVIFEPYPSVVDPNDPQ |
| | | MLAFNPRKKNYDRVMKALDSITSIRE |
| | ARMCX5 | ARYIVLVPVEGGEQSLPPEGNWTLVETLIETPLGIRP |
| | | LTKIPPYHGPYYQTLAEIKKQIRQR |
| | DNM1 | RPGSRGPAPGPPPAGSALGGAPPVPSRPGASPDPFGP |
| | | PPQVPSRPNRAPPGVPSRSGQASPS |
| 1766 | PIANP | TPSGFEEGPPSSQYPWAIVWGPTVSREDGGDPNSAN |
| | | PGFLDYGFAAPHGLATPHPNSDSMRG |
| 1767 | KCP | LNGREHRSGEPVGSGDPCSHCRCANGSVQCEPLPCP |
| | | PVPCRHPGKIPGQCCPVCDGCEYQGH |
| | ZNF541 | EACGDSPHAHESAGQPPPSSLRSLVPPEARSPGSLLP |
| | | HRDLLRRIVSSIVHQKTPSPGPAPA |
| 1768 | PCDHA9 | VCSGEGKQKTDLMAFSPGLSPCAGSTERTGEPSASS |
| | | DSTGKPRQPNPDWRYSASLRAGMHSS |
| 1769 | DMRTB1 | AAACFFEQPPRGRNPGPRALQPVLGGRSHVEPSERA |
| | | AVAMPSLAGPPFGAEAAGSGYPGPLD |
| | FMN1_0 | PAPAALGKVFNNSASQSSTHKQTSPVPSPLSPRLPSP |
| | | QQHHRILRLPALPGEREAALNDSPC |
| | FMN1_1 | LGKVFNNSASQSSTHKQTSPVPSPLSPRLPSPQQHHR |
| | | ILRLPALPGEREAALNDSPCRKSRV |
| | FBXO41 | LFARKSVASSACSTPPPGPGPGPCPGPASASPASPSP |
| | | ADVAYEEGLARLKIRALEKLEVDRR |
| | GAS2L2 | TKASLSAKGTHMRKVPPQGGQDCSASTVSASPEAP |
| | | TPSPLDPNSDKAKACLSKGRRTLRKPK |
| 1770 | ZAR1L | QPDWRQNMGPPTFLARPGLLVPANAPDYCIDPYKR |
| | | AQLKAILSQMNPSLSPRLCKPNTKEVG |
| 1771 | SHPK | WGYFNTQSQSWNVETLRSSGFPVHLLPDIAEPGSVA |
| | | GRTSHMWFEIPKGTQVGVALGDLQAS |
| | UBAP1L | VSRPRALLHGLRGHRALSLCPSPAQSPRSASPPGPAP |
| | | QHPAAPASPPRPSTAGAIPPLRSHK |
| | IGSF9B_0 | PFHHGQYYGYLSSSSPGEVEPPPFYVPEVGSPLSSVM |
| | | SSPPLPTEGPFGHPTIPEENGENAS |
| | IGSF9B_1 | NSTLPLTQTPTGGRSPEPWGRPEFPFGGLETPAMMF |
| | | PHQLPPCDVPESLQPKAGLPRGLPPT |
| | ATF7-NPFF | GCGMVVGTASTMVTARPEQSQILIQHPDAPSPAQPQ |
| | | VSPAQPTPSTGGRRRRTVDEDPDERR |
| | HSFX2 | RNSRGQDHGLERVPFPPQLQSETYLHPADPSPAWD |
| | | DPGSTGSPNLRLLTEEIAFQPLAEEAS |
| 1772 | TMEM108 | QGGTPDATAASGAPVSPQAAPVPSQRPHHGDPQDG |
| | | PSHSDSWLTVTPGTSRPLSTSSGVFTA |
| 1773 | NT5C1B-RDH14 | LRKTDSRGYLVRSQWSRISRSPSTKAPSIDEPRSRNT |
| | | SAKLPSSSTSSRTPSTSPSLHDSSP |
| | NPIPB6 | PPSVDDNLKECLFVPLPPSPLPPSVDDNLKTPPLATQ |
| | | EAEVEKPPKPKRWRVDEVEQSPKPK |
| | PCED1B | HSDVPSSAHAGFFVEDNFMVGPQLPMPFFPTPRYQR |
| | | PAPVVHRGFGRYRPRGPYTPWGQRPR |
| 1774 | FIGNL2 | QLEPFEKFPERAPAPRGGFAVPSGETPKGVDPGALE |
| | | LVTSKMVDCGPPVQWADVAGQGALKA |
| | NPIPB9 | PPSVDDNLKECLFVPLPPSPLPPSVDDNLKTPPLATQ |
| | | EAEVEKPPKPKRWRVDEVEQSPKPK |
| | SLFNL1 | DLLLSEAQGPFSHREEKEEEEEDSGLSPGPSPGSGVP |
| | | LPTWPTHTLPDRPQAQQLQSCQGRP |
| | NLGN4Y | HNLNEIFQYVSTTTKVPPPDMTSFPYGTRRSPAKIWP |
| | | TTKRPAITPANNPKHSKDPHKTGPE |
| | PRRT4 | VALPLALLGLYPALCSPRVPPRCWAKLFRLSPGHAA |
| | | PLLPGGWVTGPPDKEPLGSAIARGDA |
| 1775 | NUTM1_0 | ASALPGPDMSMKPSAAPSPSPALPFLPPTSDPPDHPP |
| | | REPPPQPIMPSVFSPDNPLMLSAFP |
| | NUTM1_1 | PALPFLPPTSDPPDHPPREPPPQPIMPSVFSPDNPLML |
| | | SAFPSSLLVTGDGGPCLSGAGAGK |
| 1776 | LMTK3_0 | TPFSPEGAFPGGGAAEEEGVPRPRAPPEPPDPGAPRP |
| | | PPDPGPLPLPGPREKPTFVVQVSTE |
| | LMTK3_1 | VSENGGLRFPRNTERPPETGPWRAPGPWEKTPESW |
| | | GPAPTIGEPAPETSLERAPAPSAVVSS |
| | LMTK3_2 | PTNELSVQAPPEGDTDPSTPPAPPTPPHPATPGDGFP |
| | | SNDSGFGGSFEWAEDFPLLPPPGPP |
| | ZCCHC14 | SSLNGGGGHGGKGAPGPGGALPTCPACHKITPRTEA |
| | | PVSSVSNSLENALHTSAHSTEESLPK |
| | MIA2 | ELKFELLEKDPYALDVPNTAFGREHSPYGPSPLGWP |
| | | SSETRAFLSPPTLLEGPLRLSPLLPG |
| | CTNND2_0 | AAAAAALYYSSSTLPAPPRGGSPLAAPQGGSPTKLQ |
| | | RGGSAPEGATYAAPRGSSPKQSPSRL |
| 1777 | CTNND2_1 | AESSGCWGKKKKKKKSQDQWDGVGPLPDCAEPPK |
| | | GIQMLWHPSIVKPYLTLLSECSNPDTLE |
| 1778 | CPXCR1 | EGSDTAGNAHKNSENEPPNDCSTDIESPSADPNMIY |
| | | QVETNPINREPGTATSQEDVVPQAAE |
| | NRG3 | SRTPNRISTRLTTITRAPTRFPGHRVPIRASPRSTTAR |
| | | NTAAPATVPSTTAPFFSSSTLGSR |
| | KCNC2 | KTLPGTRLALLASSEPPGDCLTTAGDKLQPSPPPLSP |
| | | PPRAPPLSPGPGGCFEGGAGNCSSR |
| 1779 | SEMA6B | PGRASHGDFPLTPHASPDRRRVVSAPTGPLDPASAA |
| | | DGLPRPWSPPPTGSLRRPLGPHAPPA |
| 1780 | LRRC56 | QDWLAVKEAIKKGNGLPPLDCPRGAPIRRLDPELSL |
| | | PETQSRASRPWPFSLLVRGGPLPEGL |
| 1781 | DNAJB13 | DDRLLNIPINDIIHPKYFKKVPGEGMPLPEDPTKKGD |
| | | LFIFFDIQFPTRLTPQKKQMLRQAL |
| | CD300E_0 | DAGSYWCKIQTVWVLDSWSRDPSDLVRVYVSPAIT |
| | | TPRRTTHPATPPIFLVVNPGRNLSTGE |
| | CD300E_1 | WCKIQTVWVLDSWSRDPSDLVRVYVSPAITTPRRTT |
| | | HPATPPIFLVVNPGRNLSTGEVLTQN |
| | COL9A1 | SVPFELQWMLIHCDPLRPRRETCHELPARITPSQTTD |
| | | ERGPPGEQGPPGPPGPPGVPGIDGI |
| | HTR3E | TIFITHLLHVATTQPPPLPRWLHSLLLHCNSPGRCCP |
| | | TAPQKENKGPGLTPTHLPGVKEPEV |
| 1782 | ZNF385C_0 | TLASGAPGEPQSKVPAAPPLGPPLQPPPTPDPTCREP |
| | | AHSELLDAASSSSSSSCPPCSPEPG |
| 1783 | ZNF385C_1 | APGEPQSKVPAAPPLGPPLQPPPTPDPTCREPAHSEL |
| | | LDAASSSSSSSCPPCSPEPGREAPG |
| | NPIPB15 | PPSVDDNLKDCLFVPLPPSPLPPSVDDNLKTPPLATQ |
| | | EAEAEKPPKPKRWRVDEVEQSPKPK |
| | SPEM3 | HLVRSSVPVPTSAPAPPGTLAPATTPVLAPTPAPVPA |
| | | SAPSPAPALVMALTTTPVPDPVPAT |
| | KRTAP10-4 | QVDDCPESCCEPPCCAPSCCAPAPCLSLVCTPVSRVS |
| | | SPCCPVTCEPSPCQSGCTSSCTPSC |
| 1784 | LMLN | VSIQMNGWIHDGNLLCPSCWDFCELCPPETDPPATN |
| | | LTRALPLDLCSCSSSLVVTLWLLLGN |
| | CRIP3 | GVNIGGVGSYLYNPPTPSPGCTTPLSPSSFSPPRPRTG |
| | | LPQGKKSPPHMKTFTGETSLCPGC |
| | LRRC37A2 | PEHSHLTQATVQPLDLGFTITPESKTEVELSPTMKET |
| | | PTQPPKKVVPQLRVYQGVTNPTPGQ |
| 1785 | FER1L6 | DVEPPPTVVPDSAQAQPAILVDVPDSSPMLEPEHTP |
| | | VAQEPPKDGKPKDPRKPSRRSTKRRK |
| 1786 | ZGLP1 | GCVACPRVHKEPAQVGTPWPAKPRSHPRKRDPTAL |
| | | LPRSLWPACQESVTALCFLQETVERLG |
| | KRTAP10-6 | CSDSWQVDDCPESCCEPPCCAPAPCLSLVCTPVSRV |
| | | SSPCCPVTCEPSPCQSGCTSSCTPSC |
| | PNMA5 | GRSMTDVARALGCCSLPAESLDAEVMPQVRSPPLEP |
| | | PKESMWYRKLKVFSGTASPSPGEETF |
| | ZNF683 | LLPYPGAFQASGQALPSQARNPGAGAAPTDSPGLER |
| | | GGMASPAKRVPLSSQTGTAALPYPLK |
| | PRR23A | CALAPNPSSEGHSPGPFFDPEFRLLEPVPSSPLQPLPP |
| | | SPRVGSPGPHAHPPLPKRPPCKAR |
| | SELENOV_0 | PTPLRTPTPVRTRTPIRTLTPVLTPSPAGTSPLVLTPA |
| | | PAQIPTLVPTPALARIPRLVPPPA |
| | SELENOV_1 | TPTPVRTRTPIRTLTPVLTPSPAGTSPLVLTPAPAQIPT |
| | | LVPTPALARIPRLVPPPAPAWIP |
| | SELENOV_2 | ALARIPRLVPPPAPAWIPTPVPTPVPVRNPTPVPTPAR |
| | | TLTPPVRVPAPAPAQLLAGIRAAL |
| 1788 | SELENOV_3 | LPVLDSYLAPALPLDPPPEPAPELPLLPEEDPEPAPSL |
| | | KLIPSVSSEAGPAPGPLPTRTPLA |
| | STON1-GTF2A1L_0 | EFPSGSSSTSSTPLSSPIVDFYFSPGPPSNSPLSTPTKD |
| | | FPGFPGIPKAGTHVLYPIPESSS |
| | STON1-GTF2A1L_1 | ISGGESSLLPTRPTCLSHALLPSDHSCTHPTPKVGLPD |
| | | EVNPQQAESLGFQSDDLPQFQYFR |
| | POC1B-GALNT4 | AVVVVTGRRCRSGQTVPGAARSPLLPHPLPSPLRVP |
| | | PPTGALGRPLPRWPQPRRTPFWSVIS |
| 1789 | IKZF5_0 | KPFMIQQPSTQAVVSAVSASIPQSSSPTSPEPRPSHSQ |
| | | RNYSPVAGPSSEPSAHTSTPSIGN |
| | IKZF5_1 | PTSPEPRPSHSQRNYSPVAGPSSEPSAHTSTPSIGNSQ |
| | | PSTPAPALPVQDPQLLHHCQHCDM |
| | RHBDD3 | SCGYMPVHLAMLAGEGHRPRRPRGALPPWLSPWLL |
| | | LALTPLLSSEPPFLQLLCGLLAGLAYA |
| 1790 | SATL1 | QLGMRQPGTSQSSKNQTGMSHPGRGQPGIWEPGPS |
| | | QPGLSQQDLNQLVLSQPGLSQPGRSQP |
| 1791 | PRR23C_0 | PIRGPCALAPNPSSERRSPRPIFDLEFHLLEPVPSSPLQ |
| | | PLPPSPSPGPHARPELPERPPCK |
| | PRR23C_1 | CALAPNPSSERRSPRPIFDLEFHLLEPVPSSPLQPLPPS |
| | | PSPGPHARPELPERPPCKVRRRL |
| | PRR23B | CALAPNPSSERRSPRPIFDLEFRLLEPVPSSPLQPLPPS |
| | | PCVGSPGPHARSPLPERPPCKAR |
| | STRC | GSNRRLVKRLCAGLLPPPTSCPEGLPPVPLTPDIFWG |
| | | CFLENETLWAERLCGEASLQAVPPS |
| 1792 | KRTAP29-1 | CLPSSCHSRMWQLVTCQESCQPSIGAPSGCDPASCQ |
| | | PTRLPATSCVGFVCQPMCSHAACYQS |
| 1793 | PRKCSH | YDRVWAAIRDKYRSEALPTDLPAPSAPDLTEPKEEQ |
| | | PPVPSSPTEEEEEEEEEEEEEAEEEE |
| 1794 | B3GNT8 | VYIEWTSESRLSKAYPSPRGTPPSPTPANPEPTLPAN |
| | | LSTRLGQTIPLPFAYWNQQQWRLGS |
| | NKX1-1_0 | NPGADTSAPTGGGGGPGPGAGPGTGLPGGLSPLSPS |
| | | PPMGAPLGMHGPAGYPAHGPGGLVCA |
| | NKX1-1_1 | TSAPTGGGGGPGPGAGPGTGLPGGLSPLSPSPPMGA |
| | | PLGMHGPAGYPAHGPGGLVCAAQLPF |
| | HCFC1R1 | ATHFSQLSLHNDHPYCSPPMTFSPALPPLRSPCSELL |
| | | LWRYPGSLIPEALRLLRLGDTPSPP |
| | SPATA31A3_0 | SLSASQPPEPSLPLEHPSPEPPALFPHPPHTPDPLACSL |
| | | PPPKGFTAPPLRDSTLITPSHCD |
| 1795 | SPATA31A3_1 | SASQPPEPSLPLEHPSPEPPALFPHPPHTPDPLACSLPP |
| | | PKGFTAPPLRDSTLITPSHCDSV |
| | OTUD4 | TCTDAHFPMQTEASVNGQMPQPEIGPPTFSSPLVIPP |
| | | SQVSESHGQLSYQADLESETPGQLL |
| | LRRC37A | PEHSHLTQATVQPLDLGFTITPESKTEVELSPTMKET |
| | | PTQPPKKVVPQLRVYQGVTNPTPGQ |
| | FOXB2 | PEYGAFGVPVKSLCHSASQSLPAMPVPIKPTPALPPV |
| | | SALQPGLTVPAASQQPPAPSTVCSA |
| | KRTAP10-8 | SPSTCTGSSWQVDNCQESCCEPRSCASSCCTPSCCAP |
| | | APCLALVCAPVSCEPSPCQSGCTDS |
| 1796 | PVRIG | SPCANTTFCCKFASFPEGSWEACGSLPPSSDPGLSAP |
| | | PTPAPILRADLAGILGVSGVLLFGC |
| | KRTAP10-12 | CSDSWQVDDCPESCCEPPCCAPAPCLSLVCTPVSRV |
| | | SSPCCRVTCEPSPCQSGCTSSCTPSC |
| | PLAGL2 | PPGATGGLVMGYSQAEAQPLLTTLQAQPQDSPGAG |
| | | GPLNFGPLHSLPPVFTSGLSSTTLPRF |
| | CCDC187_0 | AGQACSPQRAWGAQRQGPSSQRPGSPPEKRSPFPQQ |
| | | PWSAVATQPCPRRAWTACETWEDPGP |
| | CCDC187_1 | DTVRDPAVGLLRSCPHSLPAAPTLATPTLATPACPG |
| | | ALGPNWGRGAPGEWVSMQPQPLLPPT |
| 1797 | KRTAP2-1 | TCQTTVCRPVTCVPRCTRPICEPCRRPVCCDPCSLQE |
| | | GCCRPITCCPSSCTAVVCRPCCWAT |
| | SPATA31A7_0 | SLSASQPPEPSLPLEHPSPEPPALFPHPPHTPDPLACSL |
| | | PPPKGFTAPPLRDSTLITPSHCD |
| 1798 | SPATA31A7_1 | SASQPPEPSLPLEHPSPEPPALFPHPPHTPDPLACSLPP |
| | | PKGFTAPPLRDSTLITPSHCDSV |
| | NOBOX | LEELEPQDYQQSNQPGPFQFSQAPQPPLFQSPQPKLP |
| | | YLPTFPFSMPSSLTLPPPEDSLFMF |
| | TTN_0 | LSATSSAQKITKSVKAPTVKPSETRVRAEPTPLPQFP |
| | | FADTPDTYKSEAGVEVKKEVGVSIT |
| | TTN_1 | PAAPLGAPTYIPTLEPVSRIRSLSPRSVSRSPIRMSPAR |
| | | MSPARMSPARMSPARMSPGRRLE |
| | TTN_2 | GAPTYIPTLEPVSRIRSLSPRSVSRSPIRMSPARMSPA |
| | | RMSPARMSPARMSPGRRLEETDES |
| | TTN_3 | IPTLEPVSRIRSLSPRSVSRSPIRMSPARMSPARMSPA |
| | | RMSPARMSPGRRLEETDESQLERL |
| | TTN_4 | PVSRIRSLSPRSVSRSPIRMSPARMSPARMSPARMSP |
| | | ARMSPGRRLEETDESQLERLYKPVF |
| | TTN_5 | RSLSPRSVSRSPIRMSPARMSPARMSPARMSPARMS |
| | | PGRRLEETDESQLERLYKPVFVLKPV |
| | TTN_6 | RSVSRSPIRMSPARMSPARMSPARMSPARMSPGRRL |
| | | EETDESQLERLYKPVFVLKPVSFKCL |
| 1799 | TTN_7 | EYEPTEEYDQYEEYEEREYERYEEHEEYITEPEKPIP |
| | | VKPVPEEPVPTKPKAPPAKVLKKAV |
| 1800 | TTN_8 | YEEREYERYEEHEEYITEPEKPIPVKPVPEEPVPTKPK |
| | | APPAKVLKKAVPEEKVPVPIPKKL |
| | TTN_9 | PEVPPTKVPEVPKAAVPEKKVPEAIPPKPESPPPEVPE |
| | | APKEVVPEKKVPAAPPKKPEVTPV |
| | TTN_10 | PEVPPTKVPEVPKVAVPEKKVPEAIPPKPESPPPEVFE |
| | | EPEEVALEEPPAEVVEEPEPAAPP |
| 1801 | TTN_11 | PKPESPPPEVFEEPEEVALEEPPAEVVEEPEPAAPPQV |
| | | TVPPKKPVPEKKAPAVVAKKPELP |
| 1801 | TTN_12 | PEEEIAPEEEKPVPVAEEEEPEVPPPAVPEEPKKIIPEK |
| | | KVPVIKKPEAPPPKEPEPEKVIE |
| 1803 | TTN_13 | CSVEKLIEGHEYQFRICAENKYGVGDPVFTEPAIAK |
| | | NPYDPPGRCDPPVISNITKDHMTVSW |
| | TTN_14 | IELMRPVSELIRSRPQPAEEYEDDTERRSPTPERTRPR |
| | | SPSPVSSERSLSRFERSARFDIFS |
| | TTN_15 | EKAVTSPPRVKSPEPRVKSPEAVKSPKRVKSPEPSHP |
| | | KAVSPTETKPTPTEKVQHLPVSAPP |
| | TTN_16 | KSPEPRVKSPEAVKSPKRVKSPEPSHPKAVSPTETKP |
| | | TPTEKVQHLPVSAPPKITQFLKAEA |
| | KIF26B | ESDKEDNGSEGQLTNREGPELPASKMQRSHSPVPAA |
| | | APAHSPSPASPRSVPGSSSQHSASPL |
| 1804 | ZNF114 | TFPEANRVCLTSISSQHSTLREDWRCPKTEEPHRQG |
| | | VNNVKPPAVAPEKDESPVSICEDHEM |
| 1805 | COL16A1_0 | DGGIKGVPGKPGRDGRPGEICVIGPKGQKGDPGFVG |
| | | PEGLAGEPGPPGLPGPPGIGLPGTPG |
| 1806 | COL16A1_1 | EKGNFGEAGPAGSPGPPGPVGPAGIKGAKGEPCEPC |
| | | PALSNLQDGDVRVVALPGPSGEKGEP |
| | COL16A1_2 | NSGEKGDQGFQGQPGFPGPPGPPGFPGKVGSPGPPG |
| | | PQAEKGSEGIRGPSGLPGSPGPPGPP |
| | ESAM_0 | DTISKNGTLSSVTSARALRPPHGPPRPGALTPTPSLSS |
| | | QALPSPRLPTTDGAHPQPISPIPG |
| | ESAM_1 | TSARALRPPHGPPRPGALTPTPSLSSQALPSPRLPTTD |
| | | GAHPQPISPIPGGVSSSGLSRMGA |
| | DUSP8_0 | QLLEYERSLKLLAALQGDPGTPSGTPEPPPSPAAGAP |
| | | LPRLPPPTSESAATGNAAAREGGLS |
| | DUSP8_1 | DIKSAYAPSRRPDGPGPPDPGEAPKLCKLDSPSGAA |
| | | LGLSSPSPDSPDAAPEARPRPRRRPR |
| | DUSP8_2 | RPDGPGPPDPGEAPKLCKLDSPSGAALGLSSPSPDSP |
| | | DAAPEARPRPRRRPRPPAGSPARSP |
| | DUSP8_3 | GPPDPGEAPKLCKLDSPSGAALGLSSPSPDSPDAAPE |
| | | ARPRPRRRPRPPAGSPARSPAHSLG |
| | DUSP8_4 | PRHGLSALSAPGLPGPGQPAGPGAWAPPLDSPGTPS |
| | | PDGPWCFSPEGAQGAGGVLFAPFGRA |
| | DUSP8_5 | SALSAPGLPGPGQPAGPGAWAPPLDSPGTPSPDGPW |
| | | CFSPEGAQGAGGVLFAPFGRAGAPGP |
| 1807 | BEST4 | QPQPPYTVATAAESLRPSFLGSTFNLRMSDDPEQSL |
| | | QVEASPGSGRPAPAAQTPLLGRFLGV |
| | SULT1A2 | KCHRAPIFMRVPFLEFKVPGIPSGMETLKNTPAPRLL |
| | | KTHLPLALLPQTLLDQKVKVVYVAR |
| 1808 | LRTM2 | SSAGLDIPGPPCTKASPEPAKPKPGAEPEPEPSTACPQ |
| | | KQRHRPASVRRAMGTVIIAGVVCG |
| | GPR150 | TVLGVACGHLLSVWWRHRPQAPAAAAPWSASPGR |
| | | APAPSALPRAKVQSLKMSLLLALLFVGC |
| | DRAP1 | SEDTDTDGEEETSQPPPQASHPSAHFQSPPTPFLPFAS |
| | | TLPLPPAPPGPSAPDEEDEEDYDS |
| | IQCE | FRGHLTRTKLLASKAHGSEPPSVPGLPDQSSPVPRVP |
| | | SPIAQATGSPVQEEAIVIIQSALRA |
| 1809 | COL14A1 | CSCSETNEVALGPAGPPGGPGLRGPKGQQGEPGPKG |
| | | PDGPRGEIGLPGPQGPPGPQGPSGLS |
| | SOX13 | INLLQQQIQQVNMPYVMIPAFPPSHQPLPVTPDSQLA |
| | | LPIQPIPCKPVEYPLQLLHSPPAPV |
| 1810 | RALGDS | AVGLESAPAPALELEPAPEQDPAPSQTLELEPAPAPV |
| | | PSLQPSWPSPVVAENGLSEEKPHLL |
| | CEP170B_0 | QDFMAQCLRESSPAARPSPEKVPPVLPAPLTPHGTSP |
| | | VGPPTPPPAPTDPQLTKARKQEEDD |
| | CEP170B_1 | QCLRESSPAARPSPEKVPPVLPAPLTPHGTSPVGPPT |
| | | PPPAPTDPQLTKARKQEEDDSLSDA |
| | MAGEC2 | STSSSLILGGPEEEEVPSGVIPNLTESIPSSPPQGPPQG |
| | | PSQSPLSSCCSSFSWSSFSEESS |
| | COL22A1 | GLPGLKGDRGEKGEAGPAGPPGLPGTTSLFTPHPRM |
| | | PGEQGPKGEKGDPGLPGEPGLQGRPG |
| 1811 | SH3RF2 | LTCISRGSEAWIHSAASSLIMEDKEIPIKSEPLPKPPAS |
| | | APPSILVKPENSRNGIEKQVKTV |
| 1812 | SPRR4 | PPQRAQQQQVKQPCQPPPVKCQETCAPKTKDPCAP |
| | | QVKKQCPPKGTIIPAQQKCPSAQQASK |
| 1813 | EFCAB6_0 | MDDDQYALLTTKIGFEKEGMSYLDFAAGFEDPPMR |
| | | GPETTPPQPPTPSKSYVNSHFITAEEC |
| | EFCAB6_1 | EKEGMSYLDFAAGFEDPPMRGPETTPPQPPTPSKSY |
| | | VNSHFITAEECLKLFPRRLKESFRDP |
| 1814 | DDN | AQLAGLPAPLRPERLAPVGRAPRPSAQPQSDPGSAW |
| | | AGPWGGRRPGPPSYEAHLLLRGSAGT |
| | BEND4 | PNPSSASEYGHLADVDPLSTSPVHTLGGWTSPATSE |
| | | SHGHPSSSTLPEEEEEEDEEGYCPRC |
| | ATRIP | LKVLVKLAENTSCDFLPRFQCVFQVLPKCLSPETPLP |
| | | SVLLAVELLSLLADHDQLAPQLCSH |
| | NCAN | NRVEAHGEATATAPPSPAAETKVYSLPLSLTPTGQG |
| | | GEAMPTTPESPRADFRETGETSPAQV |
| 1815 | SYNE4_0 | EESTSPEQAQTLGQDSLGPPEHFQGGPRGNEPAAHP |
| | | PRWSTPSSYEDPAGGKHCEHPISGLE |
| | SYNE4_1 | TLGQDSLGPPEHFQGGPRGNEPAAHPPRWSTPSSYE |
| | | DPAGGKHCEHPISGLEVLEAEQNSLH |
| 1816 | ATAT1_0 | FVIFEGFFAHQHRPPAPSLRATRHSRAAAVDPTPAAP |
| | | ARKLPPKRAEGDIKPYSSSDREFLK |
| | ATAT1_1 | DIKPYSSSDREFLKVAVEPPWPLNRAPRRATPPAHPP |
| | | PRSSSLGNSPERGPLRPFVPEQELL |
| | ATAT1_2 | AVEPPWPLNRAPRRATPPAHPPPRSSSLGNSPERGPL |
| | | RPFVPEQELLRSLRLCPPHPTARLL |
| | TESK1_0 | KIKLLDTPSKPVLPLVPPSPFPSTQLPLVTTPETLVQP |
| | | GTPARRCRSLPSSPELPRRMETAL |
| 1817 | TESK1_1 | RRMETALPGPGPPAVGPSAEEKMECEGSSPEPEPPG |
| | | PAPQLPLAVATDNFISTCSSASQPWS |
| 1818 | TESK1_2 | VVVNSPQGWAGEPWNRAQHSLPRAAALERTEPSPP |
| | | PSAPREPDEGLPCPGCCLGPFSFGFLS |
| 1819 | TMEM221 | PAEVSKASPRAQPQQGIHRRTPYSTCPEPGDPFGSM |
| | | ATATAPAALEGGWESSLPASRMHRTL |
| | MYBPHL | AAGSKLKVKEASPADAEPPQASPGQGAGSPTPQLLP |
| | | PIEEHPKIWLPRALRQTYIRKVGDTV |
| | DENND2C | SEDNIYEDIIYPTKENPYEDIPVQPLPMWRSPSAWKL |
| | | PPAKSAFKAPKLPPKPQFLHRKTME |
| 1820 | GALNT12 | GLGSVLRAQRGAGAGAAEPGPPRTPRPGRREPVMP |
| | | RPPVPANALGARGEAVRLQLQGEELRL |
| 1821 | CLNK | GDASVRKNKIPLPPPRPLITLPKKYQPLPPEPESSRPP |
| | | LSQRHTFPEVQRMPSQISLRDLSE |
| | PTPN4_0 | DHMVHTSPSEVFVNQRSPSSTQANSIVLESSPSQETP |
| | | GDGKPPALPPKQSKKNSWNQIHYSH |
| | PTPN4_1 | TSPSEVFVNQRSPSSTQANSIVLESSPSQETPGDGKPP |
| | | ALPPKQSKKNSWNQIHYSHSQQDL |
| | MYCL_0 | HYFYDYDCGEDFYRSTAPSEDIWKKFELVPSPPTSPP |
| | | WGLGPGAGDPAPGIGPPEPWPGGCT |
| 1822 | MYCL_1 | TAPSEDIWKKFELVPSPPTSPPWGLGPGAGDPAPGIG |
| | | PPEPWPGGCTGDEAESRGHSKGWGR |
| | FAM110A_0 | PCRRPQLDLDILSSLIDLCDSPVSPAEASRTPGRAEG |
| | | AGRPPPATPPRPPPSTSAVRRVDVR |
| | FAM110A_1 | GAGRPPPATPPRPPPSTSAVRRVDVRPLPASPARPCP |
| | | SPGPAAASSPARPPGLQRSKSDLSE |
| | SSC5D_0 | VCAGQRVANSRDDSTSPLDGAPWPGLLLELSPSTEE |
| | | PLVTHAPRPAGNPQNASRKKSPRPKQ |
| | SSC5D_1 | TAGKLGPTLGAGTTRSPGSPPTLRVHGDTGSPRKPW |
| | | PERRPPRPAATRTAPPTPSPGPSASP |
| | SSC5D_2 | NPDLILTSPDFALSTPDSSVVPALTPEPSPTPLPTLPKE |
| | | LTSDPSTPSEVTSLSPTSEQVPE |
| | SSC5D_3 | PALESSPSRSSTATSMDPLSTEDFKPPRSQSPNLTPPP |
| | | THTPHSASDLTVSPDPLLSPTAHP |
| | SSC5D_4 | STATSMDPLSTEDFKPPRSQSPNLTPPPTHTPHSASD |
| | | LTVSPDPLLSPTAHPLDHPPLDPLT |
| | SSC5D_5 | TEDFKPPRSQSPNLTPPPTHTPHSASDLTVSPDPLLSP |
| | | TAHPLDHPPLDPLTLGPTPGQSPG |
| | SSC5D_6 | SDLTVSPDPLLSPTAHPLDHPPLDPLTLGPTPGQSPG |
| | | PHGPCVAPTPPVRVMACEPPALVEL |
| 1823 | STARD9_0 | SPQRLCSKHMPQLHSIFLSWDPSTTLPPRPDPTHQTS |
| | | EKTSSEEHLPQAASYPARTGCLRKN |
| 1824 | STARD9_1 | QPCSSQPVATHAYSSHSSTLLCFRDGDLGKEPFKAA |
| | | PHTIHPPCVVPSRAYEMDETGEISRG |
| | PTPRN_0 | GGVVNVGADIKKTMEGPVEGRDTAELPARTSPMPG |
| | | HPTASPTSSEVQQVPSPVSSEPPKAAR |
| | PTPRN_1 | RDTAELPARTSPMPGHPTASPTSSEVQQVPSPVSSEP |
| | | PKAARPPVTPVLLEKKSPLGQSQPT |
| | SOX30_0 | PTTVYPYRSPTYSVVIPSLQNPITHPVGETSPAIQLPT |
| | | PAVQSPSPVTLFQPSVSSAAQVAV |
| | SOX30_1 | HARFATSTIQPPREYSSVSPCPRSAPIPQASPIPHPHV |
| | | YQPPPLGHPATLFGTPPRFSFHHP |
| | CSPG4_0 | AGRVTYGATARASEAVEDTFRFRVTAPPYFSPLYTF |
| | | PIHIGGDPDAPVLTNVLLVVPEGGEG |
| 1825 | CSPG4_1 | RNKTGKHDVQVLTAKPRNGLAGDTETFRKVEPGQ |
| | | AIPLTAVPGQGPPPGGQPDPELLQFCRT |
| | RP1L1 | SPQVSLGDGQSEEASESSSPVPEDRPTPPPSPGGDTP |
| | | HQRPGSQTGPSSSRASSWGNCWQKD |
| 1826 | PRELP | QPTRRPRPGTGPGRRPRPRPRPTPSFPQPDEPAEPTD |
| | | LPPPLPPGPPSIFPDCPRECYCPPD |
| | C3orf22 | DSNTVQLPLQKRLVPTRSIPVRGLGAPDFTSPSGSCP |
| | | APLPAPSPPPLCNLWELKLLSRRFP |
| | COL19A1_0 | GIGIPGRTGAQGPAGEPGIQGPRGLPGLPGTPGTPGN |
| | | DGVPGRDGKPGLPGPPGDPIALPLL |
| | COL19A1_1 | SQGERGKPGLTGMKGAIGPMGPPGNKGSMGSPGHQ |
| | | GPPGSPGIPGIPADAVSFEEIKKYINQ |
| | KCNH5 | QLLSCRMTALEKQVAEILKILSEKSVPQASSPKSQMP |
| | | LQVPPQIPCQDIFSVSRPESPESDK |
| | FAM110D | QVIARRQEPALRGSPGPLTPHPCNELGPPASPRTPRP |
| | | VRRGSGRRLPRPDSLIFYRQKRDCK |
| | RUSC1 | HELAQKRKRGPGLPLVPQAKKDRSDWLIVFSPDTEL |
| | | PPSGSPGGSSAPPREVTTFKELRSRS |
| | PCARE_0 | RKASPTRTHWVPQADKRRRSLPSSYRPAQPSPSAVQ |
| | | TPPSPPVSPRVLSPPTTKRRTSPPHQ |
| | PCARE_1 | ADKRRRSLPSSYRPAQPSPSAVQTPPSPPVSPRVLSPP |
| | | TTKRRTSPPHQPKLPNPPPESAPA |
| | PCARE_2 | KVSGNTHSIFCPATSSLFEAKPPLSTAHPLTPPSLPPE |
| | | AGGPLGNPAECWKNSSGPWLRADS |
| | RASSF7 | AALGCEPRKTLTPEPAPSLSRPGPAAPVTPTPGCCTD |
| | | LRGLELRVQRNAEELGHEAFWEQEL |
| | MAN2B1 | ALGFSTYSVAQVPRWKPQARAPQPIPRRSWSPALTI |
| | | ENEHIRATFDPDTGLLMEIMNMNQQL |
| | EPX | RRPLLGASNQALARWLPAEYEDGLSLPFGWTPSRR |
| | | RNGFLLPLVRAVSNQIVRFPNERLTSD |
| | NCCRP1_0 | EVREGHALGGGMEADGPASLQELPPSPRSPSPPPSPP |
| | | PLPSPPSLPSPAAPEAPELPEPAQP |
| | NCCRP1_1 | GMEADGPASLQELPPSPRSPSPPPSPPPLPSPPSLPSPA |
| | | APEAPELPEPAQPSEAHARQLLL |
| | NCCRP1_2 | PASLQELPPSPRSPSPPPSPPPLPSPPSLPSPAAPEAPEL |
| | | PEPAQPSEAHARQLLLEEWGPL |
| | EMILIN2 | RGLPRGVDGQTGSGTVPGAEGFAGAPGYPKSPPVA |
| | | SPGAPVPSLVSFSAGLTQKPFPSDGGV |
| 1828 | STAC3 | TLRTGVIMANKERKKGQADKKNPVAAMMEEEPES |
| | | ARPEEGKPQDGNPEGDKKAEKKTPDDKH |
| | LMOD1 | GNTDTKKDDEKVKKNEPLHEKEAKDDSKTKTPEKQ |
| | | TPSGPTKPSEGPAKVEEEAAPSIFDEP |
| | MYBPC2_0 | GKDAPKGAPKEAPPKEAPAEAPKEAPPEDQSPTAEE |
| | | PTGVFLKKPDSVSVETGKDAVVVAKV |
| 1829 | MYBPC2_1 | KGAPKEAPPKEAPAEAPKEAPPEDQSPTAEEPTGVF |
| | | LKKPDSVSVETGKDAVVVAKVNGKEL |
| | MAGI2_0 | TSAPSSEKQSPMAQQSPLAQQSPLAQPSPATPNSPIA |
| | | QPAPPQPLQLQGHENSYRSEVKARQ |
| | MAGI2_1 | DEPAPWSSPAAAAPGLPEVGVSLDDGLAPFSPSHPA |
| | | PPSDPSHQISPGPTWDIKREHDVRKP |
| | MAGI2_2 | LPEVGVSLDDGLAPFSPSHPAPPSDPSHQISPGPTWDI |
| | | KREHDVRKPKELSACGQKKQRLGE |
| 1830 | RPP25L | DSWVPASPDTGLDPLTVRRHVPAVWVLLSRDPLDP |
| | | NECGYQPPGAPPGLGSMPSSSCGPRSR |
| 1831 | IGDCC3 | RDEKRVDMKELEQLFPPASAAGQPDPRPTQDPAAP |
| | | APCEETQLSVLPLQGCGLMEGKTTEAK |
| | RTN2 | LDLRLRLAQPSSPEVLTPQLSPGSGTPQAGTPSPSRS |
| | | RDSNSGPEEPLLEEEEKQWGPLERE |
| | TP53BP2 | QGKPGSPEPETEPVSSVQENHENERIPRPLSPTKLLPF |
| | | LSNPYRNQSDADLEALRKKLSNAP |
| | HCN1_0 | PPVYTATSLSHSNLHSPSPSTQTPQPSAILSPCSYTTA |
| | | VCSPPVQSPLAARTFHYASPTASQ |
| | HCN1_1 | PTASQLSLMQQQPQQQVQQSQPPQTQPQQPSPQPQT |
| | | PGSSTPKNEVHKSTQALHNTNLTREV |
| | HCN1_2 | LSLMQQQPQQQVQQSQPPQTQPQQPSPQPQTPGSST |
| | | PKNEVHKSTQALHNTNLTREVRPLSA |
| | HCN1_3 | QQPQQQVQQSQPPQTQPQQPSPQPQTPGSSTPKNEV |
| | | HKSTQALHNTNLTREVRPLSASQPSL |
| | TRIM10 | NERPARELLTDIRSTLIRCETRKCRKPVAVSPELGQR |
| | | IRDFPQQALPLQREMKMFLEKLCFE |
| | KCNH4_0 | VSQLSRELRHIMGLLQARLGPPGHPAGSAWTPDPPC |
| | | PQLRPPCLSPCASRPPPSLQDTTLAE |
| 1832 | KCNH4_1 | EVHCPASVGTMETGTALLDLRPSILPPYPSEPDPLGP |
| | | SPVPEASPPTPSLLRHSFQSRSDTF |
| 1833 | MEGF9_0 | VASAASAGNVTGGGGAAGQVDASPGPGLRGEPSHP |
| | | FPRATAPTAQAPRTGPPRATVHRPLAA |
| | MEGF9_1 | APTTLSTTTGPAPTTPVATTVPAPTTPRTPTPDLPSSS |
| | | NSSVLPTPPATEAPSSPPPEYVCN |
| 1834 | COL24A1_0 | EPGYPGDKGAVGLPGPPGMRGKSGPSGQTGDPGLQ |
| | | GPSGPPGPEGFPGDIGIPGQNGPEGPK |
| | COL24A1_1 | LPGIRGGPGRTGLAGAPGPPGVKGSSGLPGSPGIQGP |
| | | KGEQGLPGQPGIQGKRGHRGAQGDQ |
| 1835 | IGSF21 | FSRYQAQNFTLVCIVSGGKPAPMVYFKRDGEPIDAV |
| | | PLSEPPAASSGPLQDSRPFRSLLHRD |
| 1836 | COL27A1 | VAGERGHLGSRGFPGIPGPSGPPGTKGLPGEPGPQGP |
| | | QGPIGPPGEMGPKGPPGAVGEPGLP |
| | PLA2G3 | GTVPLARLQPRTFYNASWSSRATSPTPSSRSPAPPKP |
| | | RQKQHLRKGPPHQKGSKRPSKANTT |
| 1837 | FRS3_0 | DDHRRGRHCLQPLPEGQAPFLPQARGPDQRDPQVF |
| | | LQPGQVKFVLGPTPARRHMVKCQGLCP |
| | FRS3_1 | DETPLQKPTSTRAAIRSHGSFPVPLTRRRGSPRVFNF |
| | | DFRRPGPEPPRQLNYIQVELKGWGG |
| | NYNRIN | PSLSEEILRCLSLHDPPDGALDIDLLPGAASPYLGIPW |
| | | DGKAPCQQVLAHLAQLTIPSNFTA |
| | MBD6_0 | NAPSYNWGAALRSSLVPSDLGSPPAPHASSSPPSDPP |
| | | LFHCSDALTPPPLPPSNNLPAHPGP |
| | MBD6_1 | VPSDLGSPPAPHASSSPPSDPPLFHCSDALTPPPLPPS |
| | | NNLPAHPGPASQPPVSSATMHLPL |
| | MBD6_2 | ASHSSSLRPSQRRPRRPPTVFRLLEGRGPQTPRRSRP |
| | | RAPAPVPQPFSLPEPSQPILPSVLS |
| 1838 | MBD6_3 | FRLLEGRGPQTPRRSRPRAPAPVPQPFSLPEPSQPILP |
| | | SVLSLLGLPTPGPSHSDGSFNLLG |
| | MBD6_4 | PSLPGTTSGSLSSVPGAPAPPAASKAPVVPSPVLQSP |
| | | SEGLGMGAGPACPLPPLAGGEAFPF |
| | MBD6_5 | TTSGSLSSVPGAPAPPAASKAPVVPSPVLQSPSEGLG |
| | | MGAGPACPLPPLAGGEAFPFPSPEQ |
| 1839 | MBD6_6 | ACLLQSLQIPPEQPEAPCLPPESPASALEPEPARPPLS |
| | | ALAPPHGSPDPPVPELLTGRGSGK |
| | MBD6_7 | APCLPPESPASALEPEPARPPLSALAPPHGSPDPPVPE |
| | | LLTGRGSGKRGRRGGGGLRGINGE |
| | PRR35_0 | LYNHMKYSLCKDSLSLLLDSPDWACRRGSTTPRPH |
| | | APTPDRPGESDPGRQPQGARPTGAAPA |
| 1840 | PRR35_1 | LLLDSPDWACRRGSTTPRPHAPTPDRPGESDPGRQP |
| | | QGARPTGAAPAPDLVVADIHSLHCGG |
| | PRR35_2 | AAAHVPFLASASPLLPPATAFPAVQPPQRPTPAPRLY |
| | | YPLLLEHTLGLPAGKAALAKAPVSP |
| | PRR35_3 | SLTRFCSRSSLPTGSSVMLWPEDGDPGGPETPGPEGP |
| | | LPLQPRGPVPGSPEHVGEDLTRALG |
| 1841 | LMNTD2_0 | RASSEQALVQAGSYSRDSEDLQKTHSPRHGEPVLSP |
| | | QPCTDPDHWSPELLQSPTGLKIVAVS |
| 1842 | LMNTD2_1 | AGSYSRDSEDLQKTHSPRHGEPVLSPQPCTDPDHWS |
| | | PELLQSPTGLKIVAVSCREKFVRIFN |
| 1843 | LMNTD2_2 | SGKLFHAREGPARPENPEIPAPQHLPAIPGDPTLPSPP |
| | | AEAGLGLEDCRLQKEHRVRVCRKS |
| | CACNA1D | LMQQQIMAVAGLDSSKAQKYSPSHSTRSWATPPAT |
| | | PPYRDWTPCYTPLIQVEQSEALDQVNG |
| | ORAI3 | FSTALGTFLFLAEVVLVGWVKFVPIGAPLDTPTPMV |
| | | PTSRVPGTLAPVATSLSPASNLPRSS |
| | FOXE3 | GPPLPFPYAPYAPAPGPALLVPPPSAGPGPSPPARLFS |
| | | VDSLVNLQPELAGLGAPEPPCCAA |
| | POM121C_0 | SSPAAPAASSASPMFKPIFTAPPKSEKEGLTPPGPSVS |
| | | ATAPSSSSLPTTTSTTAPTFQPVF |
| | POM121C_1 | AADFSGFGSTLATSAPATSSQPTLTFSNTSTPTFNIPF |
| | | GSSAKSPLPSYPGANPQPAFGAAE |
| | MMP24 | LQGIQKIYGPPAEPLEPTRPLPTLPVRRIHSPSERKHE |
| | | RQPRPPRPPLGDRPSTPGTKPNIC |
| | GPR162 | PPRGPGFFREEITTFIDETPLPSPTASPGHSPRRPRPLG |
| | | LSPRRLSLGSPESRAVGLPLGLS |
| | ZMIZ1_0 | GNPMANANNPMNPGGNPMASGMTTSNPGLNSPQF |
| | | AGQQQQFSAKAGPAQPYIQQSMYGRPNY |
| | ZMIZ1_1 | YSNYSQGNVNRPPRPVPVANYPHSPVPGNPTPPMTP |
| | | GSSIPPYLSPSQDVKPPFPPDIKPNM |
| 1844 | DOK7_0 | EGEQISFLFDCIVRGISPTKGPFGLRPVLPDPSPPGPST |
| | | VEERVAQEALETLQLEKRLSLLS |
| 1845 | DOK7_1 | PSGWLGTRRRGLVMEAPQGSEATLPGPAPGEPWEA |
| | | GGPHAGPPPAFFSACPVCGGLKVNPPP |
| 1846 | TMEM79 | STVSEAATLPWGTGPQPSAPFPDPPGWRDIEPEPPES |
| | | EPLTKLEELPEDDANLLPEKAARAF |
| 1847 | ZFHX2 | GQEPPTHGPEPTPSRDQAAEGPNLTPEASPDPLPEPP |
| | | LASVEVPDKPSGSPGQPPSPAPSPV |
| | ADAMTSL5 | FQARVQALGWPLRQPQPRGVEPQPPAAPAVTPAQT |
| | | PTLAPDPCPPCPDTRGRAHRLLHYCGS |
| | PPP2R3A | AVLIQQTPEVIKIQNKPEKKPGTPLPPPATSPSSPRPL |
| | | SPVPHVNNVVNAPLSINIPRFYFP |
| | PCDH8 | SPEEAARGAGPRPNMFDVLTFPGTGKAPFGSPAADA |
| | | PPPAVAAAEVPGSEGGSATGESACHF |
| | MMP25 | LYGKAPQTPYDKPTRKPLAPPPQPPASPTHSPSFPIPD |
| | | RCEGNFDAIANIRGETFFFKGPWF |
| | COL5A3_0 | GRKKNKEIWTSSPPPDSAENQTSTDIPKTETPAPNLP |
| | | PTPTPLVVTSTVTTGLNATILERSL |
| | COL5A3_1 | SSPPPDSAENQTSTDIPKTETPAPNLPPTPTPLVVTST |
| | | VTTGLNATILERSLDPDSGTELGT |
| | COL5A3_2 | FPGPKGGPGDPGPTGLKGDKGPPGPVGANGSPGER |
| | | GPLGPAGGIGLPGQSGSEGPVGPAGKK |
| | COL5A3_3 | DPGPPGPIGSLGHPGPPGVAGPLGQKGSKGSPGSMG |
| | | PRGDTGPAGPPGPPGAPAELHGLRRR |
| | SOX7 | PLHCSHPLGSLALGQSPGVSMMSPVPGCPPSPAYYS |
| | | PATYHPLHSNLQAHLGQLSPPPEHPG |
| | SEZ6L_0 | IVASEEASEVPLWLDRKESAVPTTPAPLQISPFTSQP |
| | | YVAHTLPQRPEPGEPGPDMAQEAPQ |
| 1848 | SEZ6L_1 | VPTTPAPLQISPFTSQPYVAHTLPQRPEPGEPGPDMA |
| | | QEAPQEDTSPMALMDKGENELTGSA |
| | VGF | GSQQGPEEEAAEALLTETVRSQTHSLPAPESPEPAAP |
| | | PRPQTPENGPEASDPSEELEALASL |
| | PRR30 | LSPHQGLPPSQPPFSSTQSRRPSSPPPASPSPGFQFGSC |
| | | DSNSDFAPHPYSPSLPSSPTFFH |
| | SOBP | ASTTVSPSDTANCSVTKIPTPVPKSIPISETPNIPPVSV |
| | | QPPASIGPPLGVPPRSPPMVMTN |
| | INO80B_0 | LKLKIKLGGQVLGTKSVPTFTVIPEGPRSPSPLMVVD |
| | | NEEEPMEGVPLEQYRAWLDEDSNLS |
| 1849 | INO80B_1 | VLGTKSVPTFTVIPEGPRSPSPLMVVDNEEEPMEGVP |
| | | LEQYRAWLDEDSNLSPSPLRDLSGG |
| | INO80B_2 | PMVRYCSGAQGSTLSFPPGVPAPTAVSQRPSPSGPPP |
| | | RCSVPGCPHPRRYACSRTGQALCSL |
| 1850 | POU5F1_0 | MAGHLASDFAFSPPPGGGGDGPGGPEPGWVDPRTW |
| | | LSFQGPPGGPGIGPGVGPGSEVWGIPP |
| | POU5F1_1 | YAQREDFEAAGSPFSGGPVSFPLAPGPHFGTPGYGS |
| | | PHFTALYSSVPFPEGEAFPPVSVTTL |
| | POU5F1_2 | DFEAAGSPFSGGPVSFPLAPGPHFGTPGYGSPHFTAL |
| | | YSSVPFPEGEAFPPVSVTTLGSPMH |
| 1851 | EMILIN3 | TDLAWRCCPGFTGKRCPEHLTDHGAASPQLEPEPQI |
| | | PSGQLDPGPRPPSYSRAAPSPHGRKG |
| | ERICH6 | FPDVRPRLASIVSPSLTSTFVPSQSATSTETPSASPPSS |
| | | TSSHKSFPKIFQTFRKDMSEMSI |
| 1852 | HHIPL2 | FAEDEAGELYFLATSYPSAYAPRGSIYKFVDPSRRAP |
| | | PGKCKYKPVPVRTKSKRIPFRPLAK |
| | B4GALNT1 | LACASLGLLYASTRDAPGLRLPLAPWAPPQSPRRPE |
| | | LPDLAPEPRYAHIPVRIKEQVVGLLA |
| | ABRA | ANENSIRQAQEPTGWLPGGTQDSPQAPKPITPPTSHQ |
| | | KAQSAPKSPPRLPEGHGDGQSSEKA |
| 1853 | EFS | HPLTRVAPQPPGEDDAPYDVPLTPKPPAELEPDLEW |
| | | EGGREPGPPIYAAPSNLKRASALLNL |
| 1854 | AEBP1 | PPPSRRRRPERVWPEPPEEKAPAPAPEERIEPPVKPLL |
| | | PPLPPDYGDGYVIPNYDDMDYYFG |
| | PLCH2 | TGSKGVADDVVPPGPGPAPEAPAQEGPGSGSPRDTR |
| | | PLSTQRPLPPLCSLETIAEEPAPGPG |
| | STAC2_0 | LKCPTEVLLTPPTPLPPPSPPPTASDRGLATPSPSPCP |
| | | VPRPLAALKPVRLHSFQEHVFKRA |
| | STAC2_1 | IRSSEEGPGDSASPVFTAPAESEGPGPEEKSPGQQLP |
| | | KATLRKDVGPMYSYVALYKFLPQEN |
| | MAPK8IP2_0 | EEEEEEEGDGEGQEGGDPGSEAPAPGPLIPSPSVEEP |
| | | HKHRPTTLRLTTLGAQDSLNNNGGF |
| 1855 | MAPK8IP2_1 | EEGDGEGQEGGDPGSEAPAPGPLIPSPSVEEPHKHRP |
| | | TTLRLTTLGAQDSLNNNGGFDLVRP |
| | PARMI | TNHSSTVTSTQPTGAPTAPESPTEESSSDHTPTSHAT |
| | | AEPVPQEKTPPTTVSGKVMCELIDM |
| | MMP28 | QSLYGKPLGGSVAVQLPGKLFTDFETWDSYSPQGR |
| | | RPETQGPKYCHSSFDAITVDRQQQLYI |
| 1856 | PRAC2 | NLLAFFLGLSGAGPIHLPMPWPNGRRHRVLDPHTQL |
| | | STHEAPGRWKPVAPRTMKACPQVLLE |
| | SPEF2 | EGKGKKGETALKRKGSPKGKSSGGKVPVKKSPADS |
| | | TDTSPVAIVPQPPKPGSEEWVYVNEPV |
| 1857 | CMYA5_0 | EAASPGLAASTQDGLDPDQEQPDLTSIERAEPVSAK |
| | | LTPTHPSVKGEKEENMLEPSISLSEP |
| 1858 | CMYA5_1 | ISELSSLLREESQNEEIKPFSPKIISLESKEPPASVAEG |
| | | GNPEEFQPFTFSLKGLSEEVSHP |
| | CMYA5_2 | EGKKPSPEVKIPTQRKPISSIHAREPQSPESPEVTQNP |
| | | PTQPKVAKPDLPEEKGKKGISSFK |
| 1859 | VOPP1 | FWFLLMMGVLFCCGAGFFIRRRMYPPPLIEEPAFNV |
| | | SYTRQPPNPGPGAQQPGPPYYTDPGG |
| | VPS37C_0 | PVRPVPQGTPPVVEEQPQPPLAMPPYPLPYSPSPSLP |
| | | VGPTAHGALPPAPFPVVSQPSFYSG |
| | VPS37C_1 | RPVPQGTPPVVEEQPQPPLAMPPYPLPYSPSPSLPVG |
| | | PTAHGALPPAPFPVVSQPSFYSGPL |
| 1860 | TNFRSF10D | WGQSVPTASSARAGRYPGARTASGTRPWLLDPKIL |
| | | KFVVFIVAVLLPVRVDSATIPRQDEVP |
| 1861 | DSC3 | NDNPPEILQEYVVICKPKMGYTDILAVDPDEPVHGA |
| | | PFYFSLPNTSPEISRLWSLTKVNDTA |
| | TMEM200B_0 | LRQGVLRAQALRPPDGPGWDCALLPSPGPRSPRAV |
| | | GCAEPEIWDPSPRRGTSPVPSVRSLRS |
| 1862 | TMEM200B_1 | QALRPPDGPGWDCALLPSPGPRSPRAVGCAEPEIWD |
| | | PSPRRGTSPVPSVRSLRSEPANPRLG |
| 1863 | INSRR | DGDLYLNDYCHRGLRLPTSNNDPRFDGEDGDPEAE |
| | | MESDCCPCQHPPPGQVLPPLEAQEASF |
| | PAPPA_0 | PCSPSGHWSPREAEGHPDVEQPCKSSVRTWSPNSAV |
| | | NPHTVPPACPEPQGCYLELEFLYPLV |
| 1864 | PAPPA_1 | PDVEQPCKSSVRTWSPNSAVNPHTVPPACPEPQGCY |
| | | LELEFLYPLVPESLTIWVTFVSTDWD |
| 1865 | HIVEP3_0 | SSGSHSSSHERCSLSQSSTAQSLEDPPPFVEPSSEHPL |
| | | SHKPEDTHTIKQKLALRLSERKKV |
| 1866 | HIVEP3_1 | AFESTKSQFGSPGPSDAARNLPLESTKSPAEPSKSVP |
| | | SLEGPTGFQPRTPKPGSGSESGKER |
| | HIVEP3_2 | GKGPGQDRPPLGPTVPYTEALQVFHHPVAQTPLHE |
| | | KPYLPPPVSLFSFQHLVQHEPGQSPEF |
| | HIVEP3_3 | SLFSFQHLVQHEPGQSPEFFSTQAMSSLLSSPYSMPP |
| | | LPPSLFQAPPLPLQPTVLHPGQLHL |
| | HIVEP3_4 | DYPKERERTGGGPGRPPDWTPHGTGAPAEPTPTHSP |
| | | CTPPDTLPRPPQGRRAAQSWSPRLES |
| | SEC31B_0 | TLHSKETSSYRLGSQPSHQVPTPSPRPRVFTPQSSPA |
| | | MPLAPSHPSPYQGPRTQNISDYRAP |
| | SEC31B_1 | PSHQVPTPSPRPRVFTPQSSPAMPLAPSHPSPYQGPR |
| | | TQNISDYRAPGPQAIQPLPLSPGVR |
| | NYAP1 | PQQPHALPPHAHRRPASALPSRRDGTPTKTTPCEIPP |
| | | PFPNLLQHRPPLLAFPQAKSASRTP |
| | CAMTA2_0 | AGGRRGNCFFIQDDDSGEELKGHGAAPPIPSPPPSPP |
| | | PSPAPLEPSSRVGRGEALFGGPVGA |
| 1867 | CAMTA2_1 | PDSLGRLPLSVAHSRGHVRLARCLEELQRQEPSVEP |
| | | PFALSPPSSSPDTGLSSVSSPSELSD |
| | CAMTA2_2 | VAHSRGHVRLARCLEELQRQEPSVEPPFALSPPSSSP |
| | | DTGLSSVSSPSELSDGTFSVTSAYS |
| | CAMTA2_3 | GHVRLARCLEELQRQEPSVEPPFALSPPSSSPDTGLS |
| | | SVSSPSELSDGTFSVTSAYSSAPDG |
| | SYNPO2L_0 | AYYGETDSDADGPATQEKPRRPRRRGPTRPTPPGAP |
| | | PDEVYLSDSPAEPAPTIPGPPSQGDS |
| | SYNPO2L_1 | TQEKPRRPRRRGPTRPTPPGAPPDEVYLSDSPAEPAP |
| | | TIPGPPSQGDSRVSSPSWEDGAALQ |
| | SYNPO2L_2 | GEGLQSPPRAQSAPPEAAVLPPSPLPAPVASPRPFQP |
| | | GGGAPTPAPSIFNRSARPFTPGLQG |
| | SYNPO2L_3 | ACNFMQPVGARSYKTLPHVTPKTPPPMAPKTPPPM |
| | | TPKTPPPVAPKPPSRGLLDGLVNGAAS |
| | SYNPO2L_4 | QPVGARSYKTLPHVTPKTPPPMAPKTPPPMTPKTPP |
| | | PVAPKPPSRGLLDGLVNGAASSAGIP |
| | SYNPO2L_5 | FAKRQSRADRYVVEGTPGPGLGPRPRSPSPTPSLPPS |
| | | WKYSPNIRAPPPIAYNPLLSPFFPQ |
| | MUC5B_0 | CCEYVPCGPSPAPGTSPQPSLSASTEPAVPTPTQTTA |
| | | TEKTTLWVTPSIRSTAALTSQTGSS |
| | MUC5B_1 | TPGTAHTTKVPTTTTTGFTATPSSSPGTALTPPVWIS |
| | | TTTTPTTTTPTTSGSTVTPSSIPGT |
| | MUC5B_2 | ASCKDMAKTWLVPDSRKDGCWAPTGTPPTASPAAP |
| | | VSSTPTPTPCPPQPLCDLMLSQVFAEC |
| | MUC5B_3 | LVPDSRKDGCWAPTGTPPTASPAAPVSSTPTPTPCPP |
| | | QPLCDLMLSQVFAECHNLVPPGPFF |
| | SCML4 | KIPKKRGRKPGYKIKSRVLMTPLALSPPRSTPEPDLS |
| | | SIPQDAATVPSLAAPQALTVCLYIN |
| | RIN3 | PPVLPLQPCSPAQPPVLPALAPAPACPLPTSPPVPAPH |
| | | VTPHAPGPPDHPNQPPMMTCERLP |
| | RBBP8NL | QRISNQLHGTIAVVRPGSQACPADRGPANGTPPPLP |
| | | ARSSPPSPAYERGLSLDSFLRASRPS |
| | ADGRG2_0 | VPKATSFAEPPDYSPVTHNVPSPIGEIQPLSPQPSAPI |
| | | ASSPAIDMPPQSETISSPMPQTHV |
| | ADGRG2_1 | PDYSPVTHNVPSPIGEIQPLSPQPSAPIASSPAIDMPPQ |
| | | SETISSPMPQTHVSGTPPPVKAS |
| | ADGRG2_2 | SAPIASSPAIDMPPQSETISSPMPQTHVSGTPPPVKAS |
| | | FSSPTVSAPANVNTTSAPPVQTDI |
| | ADGRG2_3 | DMPPQSETISSPMPQTHVSGTPPPVKASFSSPTVSAP |
| | | ANVNTTSAPPVQTDIVNTSSISDLE |
| 1868 | FAM193B | NGLVRRLNTVPNLSRVIWVKTPKPGYPSSEEPSSKE |
| | | VPSCKQELPEPVSSGGKPQKGKRQGS |
| 1869 | ZSCAN25 | RGAWEPGIQLGPVEVKPEWGMPPGEGVQGPDPGTE |
| | | EQLSQDPGDETRAFQEQALPVLQAGPG |
| 1870 | C9orf131_0 | QSPGTSPLEVLPGYETHLETTGHKKMPQAFEPPMPP |
| | | PCQSPASLSEPRKVSPEGGLAISKDF |
| 1871 | C9orf131_1 | THLETTGHKKMPQAFEPPMPPPCQSPASLSEPRKVS |
| | | PEGGLAISKDFWGTVGYREKPQASES |
| | C9orf131_2 | SSLSTPLPEPHIDLELVWRNVQQREVPQGPSPLAVDP |
| | | LHPVPQPPTLAEAVKIERTHPGLPK |
| 1872 | C9orf131_3 | PLPEPHIDLELVWRNVQQREVPQGPSPLAVDPLHPV |
| | | PQPPTLAEAVKIERTHPGLPKGVTCP |
| | SLC30A6 | VAANVLNFSDHHVIPMPLLKGTDDLNPVTSTPAKPS |
| | | SPPPEFSFNTPGKNVNPVILLNTQTR |
| | HEYL | FFHSCPGLPALSNQLAILGRVPSPVLPGVSSPAYPIPA |
| | | LRTAPLRRATGIILPARRNVLPSR |
| | SPPL2B | WTGSGFAKVLPPSPWAPAPADGPQPPKDSATPLSPQ |
| | | PPSEEPATSPWPAEQSPKSRTSEEMG |
| 1873 | DQX1 | SDSLQGLLQDARLEKLPGDLRVVVVTDPALEPKLR |
| | | AFWGNPPIVHIPREPGERPSPIYWDTI |
| | CACNB1 | EAERQALAQLEKAKTKPVAFAVRTNVGYNPSPGDE |
| | | VPVQGVAITFEPKDFLHIKEKYNNDWW |
| 1874 | COL25A1 | IKGEPGESGRPGQKGEPGLPGLPGLPGIKGEPGFIGP |
| | | QGEPGLPGLPGTKGERGEAGPPGRG |
| | PRR16 | YNIKNREVHLHSEPVHPPGKIPHQGPPLPPTPHLPPFP |
| | | LENGGMGISHSNSFPPIRPATVPP |
| 1875 | SYCP2L | TNMVEFMSAEDDRCLITLHLNDQSEPPVIGEPASDS |
| | | HLQPVPPFGVPDFPQQPKSHYRKHLF |
| 1876 | ASIC3 | QTFVSCQQQQLSFLPPPWGDCSSASLNPNYEPEPSDP |
| | | LGSPSPSPSPPYTLMGCRLACETRY |
| | TRABD2B | HTPAGQAIHSPAPQSPAPSPEGTSTSPAPVTPAAAVP |
| | | EAPSVTPTAPPEDEDPALSPHLLLP |
| | PRR18 | SSWPSATLKRPPARRGPGLDRTQPPAPPGVSPQALPS |
| | | RARAPATCAPPRPAGSGHSPARTTY |
| | UBALD1 | ATSSSAASSWPTAASPPGGPQHHQPQPPLWTPTPPSP |
| | | ASDWPPLAPQQATSEPRAHPAMEAE |
| 1877 | COL28A1 | PYGPKGPRGIQGITGPPGDPGPKGFQGNKGEPGPPGP |
| | | YGSPGAPGIGQQGIKGERGQEGRPG |
| | RTL3_0 | YDLLRKSSEAKEPQKLPEHMNPPAAWEAQKTPEFK |
| | | EPQKPPEPQDLLPWEPPAAWELQEAPA |
| 1878 | RTL3_1 | KSSEAKEPQKLPEHMNPPAAWEAQKTPEFKEPQKPP |
| | | EPQDLLPWEPPAAWELQEAPAAPESL |
| 1879 | OIT3 | PFLLLTCLFITGTSVSPVALDPCSAYISLNEPWRNTD |
| | | HQLDESQGPPLCDNHVNGEWYHFTG |
| | RNF149_0 | EMPAPESPPGRDPAANLSLALPDDDGSDDSSPPSASP |
| | | AESEPQCDPSFKGDAGENTALLEAG |
| | RNF149_1 | ESPPGRDPAANLSLALPDDDGSDDSSPPSASPAESEP |
| | | QCDPSFKGDAGENTALLEAGRSDSR |
| | PTPRQ | GYGNASNWISTKTLPGPPDGPPENVHVVATSPFSISI |
| | | SWSEPAVITGPTCYLIDVKSVDNDE |
| | PLSCR3 | YPEPALHPGPGQAPVPAQVPAPAPGFALFPSPGPVA |
| | | LGSAAPFLPLPGVPSGLEFLVQIDQI |
| 1880 | HAVCR1_0 | TTSIPTTTSVPVTTTVSTFVPPMPLPRQNHEPVATSPS |
| | | SPQPAETHPTTLQGAIRREPTSSP |
| | HAVCR1_1 | TTTSVPVTTTVSTFVPPMPLPRQNHEPVATSPSSPQP |
| | | AETHPTTLQGAIRREPTSSPLYSYT |
| 1880 | KRTAP2-4 | TCQTTVCRPVTCVPRCTRPICEPCRRPVCCDPCSLQE |
| | | GCCRPITCCPSSCTAVVCRPCCWAT |
| | DNAJC30 | RRKYDRGLLSDEDLRGPGVRPSRTPAPDPGSPRTPPP |
| | | TSRTHDGSRASPGANRTMFNFDAFY |
| | LPO | RKPALGAANRALARWLPAEYEDGLSLPFGWTPGKT |
| | | RNGFPLPLAREVSNKIVGYLNEEGVLD |
| | PYGO1 | SSNPYLGPGYPGFGGYSTFRMPPHVPPRMSSPYCGP |
| | | YSLRNQPHPFPQNPLGMGFNRPHAFN |
| | ADGRG4 | NYATSLNTPVSYPPWTPSSATLPSLTSFVYSPHSTEA |
| | | EISTPKTSPPPTSQMVEFPVLGTRM |
| | SYN3 | PGSSLFSSLSSAMKQAPQATSGLMEPPGPSTPIVQRP |
| | | RILLVIDDAHTDWSKYFHGKKVNGE |
| | MAP3K13 | SGMQTKRPDLLRSEGIPTTEVAPTASPLSGSPKMSTS |
| | | SSKSRYRSKPRHRRGNSRGSHSDFA |
| 1882 | TUT1 | FLDLGDLEEPQPVPKAPESPSLDSALASPLDPQALAC |
| | | TPASPPDSQPPASPQDSEALDFETP |
| | SFTPA2 | PGSHGLPGRDGRDGVKGDPGPPGPMGPPGETPCPPG |
| | | NNGLPGAPGVPGERGEKGEAGERGPP |
| 1883 | HECW1_0 | STLKDSSEKDGLSEVDTVAADPSALEEDREEPEGAT |
| | | PGTAHPGHSGGHFPSLANGAAQDGDT |
| | HECW1_1 | SSEKDGLSEVDTVAADPSALEEDREEPEGATPGTAH |
| | | PGHSGGHFPSLANGAAQDGDTHPSTG |
| | CELF3 | ITPSSGTSTPPAIAATPVSAIPAALGVNGYSPVPTQPT |
| | | GQPAPDALYPNGVHPYPAQSPAAP |
| 1884 | CCDC17_0 | ALQMQRGRAPLGPQDLRLLGDASLQPKGRRDPPLL |
| | | PPPVAPPLPPLPGFSEPQLPGTMTRNL |
| 1885 | CCDC17_1 | DASLQPKGRRDPPLLPPPVAPPLPPLPGFSEPQLPGT |
| | | MTRNLGLDSHFLLPTSDMLGPAPYD |
| | INAFM1 | AAVLLAVYYGLIWVPTRSPAAPAGPQPSAPSPPCAA |
| | | RPGVPPVPAPAAASLSCLLGVPGGPR |
| 1886 | GGN | EQIHSAPGPRRPAPALLAPPTFIFPAPTNGEPMRPGPP |
| | | GLQELPPLPPPTPPPTLQPPALQP |
| 1887 | CDX1_0 | SLGLGPQAYGPPAPPPAPPQYPDFSSYSHVEPAPAPP |
| | | TAWGAPFPAPKDDWAAAYGPGPAAP |
| | CDX1_1 | KDDWAAAYGPGPAAPAASPASLAFGPPPDFSPVPAP |
| | | PGPGPGLLAQPLGGPGTPSSPGAQRP |
| | TEX13D | SRSHSQGEGSERSQRMPLPGDSGCHNPLSESPQGTA |
| | | PLGSSGCHSQEEGTEGPQGMDPLGNR |
| 1888 | BEST2_0 | VSEASTGASCSCAVVPEGAAPECSCGDPLLDPGLPE |
| | | PEAPPPAGPEPLTLIPGPVEPFSIVT |
| 1889 | BEST2_1 | TGASCSCAVVPEGAAPECSCGDPLLDPGLPEPEAPPP |
| | | AGPEPLTLIPGPVEPFSIVTMPGPR |
| 1890 | BEST2_2 | PEGAAPECSCGDPLLDPGLPEPEAPPPAGPEPLTLIPG |
| | | PVEPFSIVTMPGPRGPAPPWLPSP |
| | NDST2 | FLQCWTRLRLQTLPPVPLAQKYFELFPQERSPLWQN |
| | | PCDDKRHKDIWSKEKTCDRLPKFLIV |
| 1891 | TNXB | VRTLCSLHGVFDLSRCTCSCEPGWGGPTCSDPTDAE |
| | | IPPSSPPSASGSCPDDCNDQGRCVRG |
| | SPATA31E1 | DPLGDVCKPVPAKAHQPHGKCMQDPSPASLSPPAPP |
| | | APLASTLSPGPMTFSEPFGPHSTLSA |
| 1892 | HTR3C | CTSPGRCCPTAPQKGNKGLGLTLTHLPGPKEPGELA |
| | | GKKLGPRETEPDGGSGWTKTQLMELW |
| 1893 | ITGAL | EGPITHQWSVQMEPPVPCHYEDLERLPDAAEPCLPG |
| | | ALFRCPVVFRQEILVQVIGTLELVGE |
| | SPATC1 | LAPQVATSYTPSSTTHIAQGAPHPPSRMHNSPTQNLP |
| | | VPHCPPHNAHSPPRTSSSPASVNDS |
| | SIGLEC12_0 | SARPAVGVGDTGMEDANAVRGSASQGPLIESPADD |
| | | SPPHHAPPALATPSPEEGEIQYASLSF |
| | SIGLEC12_1 | VGVGDTGMEDANAVRGSASQGPLIESPADDSPPHH |
| | | APPALATPSPEEGEIQYASLSFHKARP |
| 1894 | SOWAHA_0 | KQFVNNVAVVKELDGVKFVVLRKKPRPPEPEPAPF |
| | | GPPGAAAQPSKPTSTVLPRSASAPGAP |
| 1895 | SOWAHA_1 | AQPSKPTSTVLPRSASAPGAPPLVRVPRPVEPPGDLG |
| | | LPTEPQDTPGGPASEPAQPPGERSA |
| 1896 | SOWAHA_2 | LPRSASAPGAPPLVRVPRPVEPPGDLGLPTEPQDTPG |
| | | GPASEPAQPPGERSADPPLPALELA |
| 1897 | SOWAHA_3 | ALELAQATERPSADAAPPPRAPSEAASPCSDPPDAEP |
| | | GPGAAKGPPQQKPCMLPVRCVPAPA |
| | SOWAHA_4 | SVEESGLGLGLGPGRSPHLRRLSRAGPRLLSPDAEEL |
| | | PAAPPPSAVPLEPSEHEWLVRTAGG |
| | RAPGEF5_0 | VGSVKMQPPCESPALAAAAAVVAADGPLRRSPSAR |
| | | EPEREQPPASLRPRLRDLPALLRSGLT |
| 1898 | RAPGEF5_1 | MQPPCESPALAAAAAVVAADGPLRRSPSAREPERE |
| | | QPPASLRPRLRDLPALLRSGLTLRRKR |
| 1899 | PNRC1 | RLAPLGFSSRGYFGALPMVTTAPPPLPRIPDPRALPP |
| | | TLFLPHFLGGDGPCLTPQPRAPAAL |
| 1900 | THEG | PRGLQSSVYESRRVTDPERQDLDNAELGPEDPEEEL |
| | | PPEEVAGEEFPETLDPKEALSELERV |
| 1901 | PRSS36 | ARHLLLPLVMLVISPIPGAFQDSALSPTQEEPEDLDC |
| | | GRPEPSARIVGGSNAQPGTWPWQVS |
| | ADRB1 | RVFREAQKQVKKIDSCERRFLGGPARPPSPSPSPVPA |
| | | PAPPPGPPRPAAAAATAPLANGRAG |
| | CNGB1 | ATGAASDPAPPGRPQEMGPKLQARETPSLPTPIPLQP |
| | | KEEPKEAPAPEPQPGSQAQTSSLPP |
| 1902 | PROB1_0 | GIPRQLPTAPARRQDSSGSSGSYYTAPGSPEPPDVGP |
| | | DAKGPANWPWVAPGRGAGAQPRLSV |
| | PROB1_1 | DRTVQRARSPPFECRIPSEVPSRAVRPRSPSPPRQTPN |
| | | GAVRGPRCPSPQNLSPWDRTTRRV |
| | PROB1_2 | RARSPPFECRIPSEVPSRAVRPRSPSPPRQTPNGAVR |
| | | GPRCPSPQNLSPWDRTTRRVSSPLF |
| | PROB1_3 | QAPLPREPLALAGRTAPAQPRAASAPPTDRSPQSPSQ |
| | | GARRQPGAAPLGKVLVDPESGRYYF |
| | SPATA31D1 | LADLFSPSPLRDPLPPQPVSPLDSKFPIDHSPPQQLPF |
| | | PLLPPHHIERVESSLQPEASLSLN |
| | ARHGEF18 | RSLSPILPGRHSPAPPPDPGFPAPSPPPADSPSEGFSLK |
| | | AGGTALLPGPPAPSPLPATPLSA |
| 1903 | IL12RB2 | DLPTHDGYLPSNIDDLPSHEAPLADSLEELEPQHISLS |
| | | VFPSSSLHPLTFSCGDKLTLDQLK |
| | ALPK1 | SLQEPNNDNLEPSQNQPQQQMPLTPFSPHNTPGIFLA |
| | | PGAGLLEGAPEGIQEVRNMGPRNTS |
| | PRICKLE1 | EYAWVPPGLRPEQIQLYFACLPEEKVPYVNSPGEKH |
| | | RIKQLLYQLPPHDNEVRYCQSLSEEE |
| 1904 | B4GALNT3_0 | SKRNSTASFPGRTSHIPVQQPEKRKQKPSPEPSQDSP |
| | | HSDKWPPGHPVKNLPQMRGPRPRPA |
| | B4GALNT3_1 | TASFPGRTSHIPVQQPEKRKQKPSPEPSQDSPHSDKW |
| | | PPGHPVKNLPQMRGPRPRPAGDSPR |
| | KRTAP10-2 | QVDDCPESCCELPCGTPSCCAPAPCLTLVCTPVSCVS |
| | | SPCCQAACEPSACQSGCTSSCTPSC |
| | PRDM12 | CQSAYSQLAGLRAHQKSARHRPPSTALQAHSPALP |
| | | APHAHAPALAAAAAAAAAAAAHHLPAM |
| 1905 | USP9Y | RSHSARMTLAKACELCPEEEPDDQDAPDEHEPSPSE |
| | | DAPLYPHSPASQYQQNNHVHGQPYTG |
| 1906 | KRTAP2-3 | TCQTTVCRPVTCVPRCTRPICEPCRRPVCCDPCSLQE |
| | | GCCRPITCCPSSCTAVVCRPCCWAT |
| | POU6F2_0 | ELRGEDKAATSDSELNEPLLAPVESNDSEDTPSKLF |
| | | GARGNPALSDPGTPDQHQASQTHPPF |
| | POU6F2_1 | QQQQPPPSTNQHPQPAPQAPSQSQQQPLQPTPPQQP |
| | | PPASQQPPAPTSQLQQAPQPQQHQPH |
| | POU6F2_2 | QQHQPHSHSQNQNQPSPTQQSSSPPQKPSQSPGHGL |
| | | PSPLTPPNPLQLVNNPLASQAAAAAA |
| | POU6F2_3 | NQNQPSPTQQSSSPPQKPSQSPGHGLPSPLTPPNPLQ |
| | | LVNNPLASQAAAAAAAMSSIASSQA |
| 1907 | DSCAML1 | ASTATLPQRTLAMPAPPAGTAPPAPGPTPAEPPTAPS |
| | | AAPPAPSTEPPRAGGPHTKMGGSRD |
| | LDB3_0 | KIKSASYNLSLTLQKSKRPIPISTTAPPVQTPLPVIPHQ |
| | | KDPALDTNGSLVAPSPSPEARAS |
| 1908 | LDB3_1 | LTLQKSKRPIPISTTAPPVQTPLPVIPHQKDPALDTNG |
| | | SLVAPSPSPEARASPGTPGTPELR |
| | LDB3_2 | AAPAPKPRVVTTASIRPSVYQPVPASTYSPSPGANYS |
| | | PTPYTPSPAPAYTPSPAPAYTPSPV |
| | LDB3_3 | VVTTASIRPSVYQPVPASTYSPSPGANYSPTPYTPSP |
| | | APAYTPSPAPAYTPSPVPTYTPSPA |
| | LDB3_4 | SIRPSVYQPVPASTYSPSPGANYSPTPYTPSPAPAYTP |
| | | SPAPAYTPSPVPTYTPSPAPAYTP |
| | LDB3_5 | PVPASTYSPSPGANYSPTPYTPSPAPAYTPSPAPAYT |
| | | PSPVPTYTPSPAPAYTPSPAPNYNP |
| 1909 | SPAG4 | PRSHNWQTACGAATVRGGASEPTGSPVVSEEPLDL |
| | | LPTLDLRQEMPPPRVFKSFLSLLFQGL |
| 1910 | KIAA1549L_0 | KHPPRSDIPPLLPLPPSSSLAPDSPHSIISEPAEQSPKV |
| | | LLVPQTAPADPSLGQNIANPLIP |
| | KIAA1549L_1 | SDIPPLLPLPPSSSLAPDSPHSIISEPAEQSPKVLLVPQ |
| | | TAPADPSLGQNIANPLIPFSDEM |
| 1911 | IHO1 | IPIQTCKFNSKYQSPQPAISVPQSPFLGQQEPRAQPLH |
| | | LQCPRSPRKPVCPILGGTVMPNKT |
| 1912 | TTLL8 | KVELPACPCRHVDSQAPNTGVPVAQPAKSWDPNQL |
| | | NAHPLEPVLRGLKTAEGALRPPPGGKG |
| 1913 | TTLL3 | ELGPGRRGSASWYRQEGGAVCNWLRKPQPLEPRTS |
| | | FPSARRSEFRPPRRLPWAGPASAQSEE |
| 1914 | GGT6 | TSDLAGDALLSLLAGDLGVEVPSAVPRPTLEPAEQL |
| | | PVPQGILFTTPSPSAGPELLALLEAA |
| | FXYD5 | MDIQVPTRAPDAVYTELQPTSPTPTWPADETPQPQT |
| | | QTQQLEGTDGPLVTDPETHKSTKAAH |
| 1915 | DENND3 | GKTRMRSLRKKREKPRPEQWKGLPGPPRAPEPEDV |
| | | AVPGGVDLLTLPQLCFPGGVCVATEPK |
| | HGFAC_0 | CTSEGSAHRKWCATTHNYDRDRAWGYCVEATPPP |
| | | GGPAALDPCASGPCLNGGSCSNTQDPQS |
| 1916 | HGFAC_1 | WCATTHNYDRDRAWGYCVEATPPPGGPAALDPCA |
| | | SGPCLNGGSCSNTQDPQSYHCSCPRAFT |
| | KCNH6_0 | KPMPQGHASYILEAPASNDLALVPIASETTSPGPRLP |
| | | QGFLPPAQTPSYGDLDDCSPKHRNS |
| | KCNH6_1 | ASNDLALVPIASETTSPGPRLPQGFLPPAQTPSYGDL |
| | | DDCSPKHRNSSPRMPHLAVATDKTL |
| | KCNH6_2 | ASETTSPGPRLPQGFLPPAQTPSYGDLDDCSPKHRNS |
| | | SPRMPHLAVATDKTLAPSSEQEQPE |
| | ADAM19_0 | GCGKKCNGHGVCNNNQNCHCLPGWAPPFCNTPGH |
| | | GGSIDSGPMPPESVGPVVAGVLVAILVL |
| | ADAM19_1 | PFRVSQNSGTGHANPTFKLQTPQGKRKVINTPEILRK |
| | | PSQPPPRPPPDYLRGGSPPAPLPAH |
| | ESYT3 | KKSPATIFLTVPGPHSPGPIKSPRPMKCPASPFAWPP |
| | | KRLAPSMSSLNSLASSCFDLADISL |
| | SHANK1_0 | RSGRGRKGPLVKQTKVEGEPQKGGGLPPAPSPTSPA |
| | | SPQPPPAVAAPSEKNSIPIPTIIIKA |
| | SHANK1_1 | RGRKGPLVKQTKVEGEPQKGGGLPPAPSPTSPASPQ |
| | | PPPAVAAPSEKNSIPIPTIIIKAPST |
| | SHANK1_2 | PTQPEPTGGGGGGGSSPSPAPAMSPVPPSPSPVPTPA |
| | | SPSGPATLDFTSQFGAALVGAARRE |
| | SHANK1_3 | PVTSGRGPPSEDGPGVPPPSPRRSVPPSPTSPRASEEN |
| | | GLPLLVLPPPAPSVDVEDGEFLFV |
| | SHANK1_4 | PSVDVEDGEFLFVEPLPPPLEFSNSFEKPESPLTPGPP |
| | | HPLPDTPAPATPLPPVPPPAVAAA |
| | SHANK1_5 | DVEDGEFLFVEPLPPPLEFSNSFEKPESPLTPGPPHPL |
| | | PDTPAPATPLPPVPPPAVAAAPPT |
| | SHANK1_6 | EPLPPPLEFSNSFEKPESPLTPGPPHPLPDTPAPATPLP |
| | | PVPPPAVAAAPPTLDSTASSLTS |
| | SHANK1_7 | PLEFSNSFEKPESPLTPGPPHPLPDTPAPATPLPPVPPP |
| | | AVAAAPPTLDSTASSLTSYDSEV |
| | EMID1 | VSELTERLKVLEAKMTMLTVIEQPVPPTPATPEDPA |
| | | PLWGPPPAQGSPGDGGLQDQVGAWGL |
| | MYOZ3_0 | ELHIFPASPGASLGGPEGAHPAAAPAGCVPSPSALAP |
| | | GYAEPLKGVPPEKFNHTAISKGYRC |
| 1917 | MYOZ3_1 | ASLGGPEGAHPAAAPAGCVPSPSALAPGYAEPLKG |
| | | VPPEKFNHTAISKGYRCPWQEFVSYRD |
| 1918 | ZDHHC1 | MRTFRHMRPEPPGQAGPAAVNAKHSRPASPDPTPG |
| | | RRDCAGPPVQVEWDRKKPLPWRSPLLL |
| | DAB1_0 | PTVAGQFPPAAFMPTQTVMPLPAAMFQGPLTPLAT |
| | | VPGTSDSTRSSPQTDKPRQKMGKETFK |
| | DAB1_1 | QTVMPLPAAMFQGPLTPLATVPGTSDSTRSSPQTDK |
| | | PRQKMGKETFKDFQMAQPPPVPSRKP |
| | DAB1_2 | YFNKVGVAQDTDDCDDFDISQLNLTPVTSTTPSTNS |
| | | PPTPAPRQSSPSKSSASHASDPTTDD |
| | DAB1_3 | GVAQDTDDCDDFDISQLNLTPVTSTTPSTNSPPTPAP |
| | | RQSSPSKSSASHASDPTTDDIFEEG |
| | DAB1_4 | DFDISQLNLTPVTSTTPSTNSPPTPAPRQSSPSKSSAS |
| | | HASDPTTDDIFEEGFESPSKSEEQ |
| 1919 | COL13A1 | LDGRPGPPGTPGPIGVPGPAGPKGERGSKGDPGMTG |
| | | PTGAAGLPGLHGPPGDKGNRGERGKK |
| | VEGFB | SAVKPDRAATPHHRPQPRSVPGWDSAPGAPSPADIT |
| | | HPTPAPGPSAHAAPSTTSALTPGPAA |
| | TOX2_0 | PSFPLSPTLHQQLSLPPHAQGALLSPPVSMSPAPQPP |
| | | VLPTPMALQVQLAMSPSPPGPQDFP |
| | TOX2_1 | QQLSLPPHAQGALLSPPVSMSPAPQPPVLPTPMALQ |
| | | VQLAMSPSPPGPQDFPHISEFPSSSG |
| | MAP3K12 | GLLKPHPSRGLLHGNTMEKLIKKRNVPQKLSPHSKR |
| | | PDILKTESLLPKLDAALSGVGLPGCP |
| 1920 | PARP6 | EVVDLLVAMCRAALESPRKSIIFEPYPSVVDPTDPKT |
| | | LAFNPKKKNYERLQKALDSVMSIRE |
| | NLGN1 | EILGPVIQFLGVPYAAPPTGERRFQPPEPPSPWSDIRN |
| | | ATQFAPVCPQNIIDGRLPEVMLPV |
| | POM121_0 | SSPAAPAASSAPPMFKPIFTAPPKSEKEGPTPPGPSVT |
| | | ATAPSSSSLPTTTSTTAPTFQPVF |
| | POM121_1 | AADFSGFGSTLATSAPATSSQPTLTFSNTSTPTFNIPF |
| | | GSSAKSPLPSYPGANPQPAFGAAE |
| 1921 | GPR137 | GCSWEHSRGESTRCQDQAATTTVSTPPHRRDPPPSP |
| | | TEYPGPSPPHPRPLCQVCLPLLAQDP |
| 1922 | PPFIA4 | SALREESAKDWETSPLPGMLAPAAGPAFDSDPEISD |
| | | VDEDEPGGLVGSADVVSPSGHSDAQT |
| | PCDH15_0 | LGPMFLPCVLVPNTRDCRPLTYQAAIPELRTPEELNP |
| | | IIVTPPIQAIDQDRNIQPPSDRPGI |
| | PCDH15_1 | VPNTRDCRPLTYQAAIPELRTPEELNPIIVTPPIQAID |
| | | QDRNIQPPSDRPGILYSILVGTPE |
| | PCDH15_2 | PISPPSPPPAPAPLAPPPDISPFSLFCPPPSPPSIPLPLPPP |
| | | TFFPLSVSTSGPPTPPLLPP |
| | COL4A6 | PCIIPGSYGPSGFPGTPGFPGPKGSRGLPGTPGQPGSS |
| | | GSKGEPGSPGLVHLPELPGFPGPR |
| 1923 | NT5C1B | LRKTDSRGYLVRSQWSRISRSPSTKAPSIDEPRSRNT |
| | | SAKLPSSSTSSRTPSTSPSLHDSSP |
| | MCIDAS_0 | SDSSSMMSPTLASGDFPFSPCDISPFGPCLSPPLDPRA |
| | | LQSPPLRPPDVPPPEQYWKEVADQ |
| | MCIDAS_1 | LASGDFPFSPCDISPFGPCLSPPLDPRALQSPPLRPPD |
| | | VPPPEQYWKEVADQNQRALGDALV |
| | NEUROD1 | PPYGTMDSSHVFHVKPPPHAYSAALEPFFESPLTDC |
| | | TSPSFDGPLSPPLSINGNFSFKHEPS |
| | SPATA31A5_0 | SLSASQPPEPSLPLEHPSPEPPALFPHPPHTPDPLACSL |
| | | PPPKGFTAPPLRDSTLITPSHCD |
| 1924 | SPATA31A5_1 | SASQPPEPSLPLEHPSPEPPALFPHPPHTPDPLACSLPP |
| | | PKGFTAPPLRDSTLITPSHCDSV |
| 1925 | ADAM33 | PKDGPHRDHPLGGVHPMELGPTATGQPWPLDPENS |
| | | HEPSSHPEKPLPAVSPDPQADQVQMPR |
| | GCM2 | LSSCNYAPEDTGMSVYPEPWGPPVTVTRAASPSGPP |
| | | PMKIAGDCRAIRPTVAIPHEPVSSRT |
| 1926 | PLCH1 | NRAKFKANGNCGYVLKPQQMCKGTFNPFSGDPLPA |
| | | NPKKQLILKVISGQQLPKPPDSMFGDR |
| 1927 | LAMA5 | LPPGLPLTHAQDLTPAMSPAGPRPRPPTAVDPDAEP |
| | | TLLREPQATVVFTTHVPTLGRYAFLL |
| 1928 | TTLL10 | QPGARRPAPPPLVPQRPRPPGPDLDSAHDGEPQAPG |
| | | TEQSGTGNRHPAQEPSPGTAKEEREE |
| 1929 | LONRF2 | RPEELEELAGGLVRAVGLRDRPLSAENPGGEPEAPG |
| | | EGGPAPEPRAPRDLLGCPRCRRLLHK |
| 1930 | MXRA7_0 | ASPEPARAPPEPAPPAEATGAPAPSRPCAPEPAASPA |
| | | GPEEPGEPAGLGELGEPAGPGEPEG |
| 1931 | MXRA7_1 | EPAPPAEATGAPAPSRPCAPEPAASPAGPEEPGEPAG |
| | | LGELGEPAGPGEPEGPGDPAAAPAE |
| | TOGARAM2 | PSPLPPGQGVLTGLRAPRTRLARGSGPREKTPASLEP |
| | | KPLASPIRDRPAAAKKPALPFSQSA |
| 1932 | KIF17 | RLSSTVARTDAPQADVPKVPVQVPAPTDLLEPSDAR |
| | | PEAEAADDFPPRPEVDLASEVALEVV |
| | COL4A3_0 | GSKGERGRPGKDAMGTPGSPGCAGSPGLPGSPGPPG |
| | | PPGDIVFRKGPPGDHGLPGYLGSPGI |
| | COL4A3_1 | GEPGLQGTQGVPGAPGPPGEAGPRGELSVSTPVPGP |
| | | PGPPGPPGHPGPQGPPGIPGSLGKCG |
| | COL4A3_2 | PHGDLGFKGIKGLLGPPGIRGPPGLPGFPGSPGPMGI |
| | | RGDQGRDGIPGPAGEKGETGLLRAP |
| | COL4A3_3 | DKGSMGHPGPKGPPGTAGDMGPPGRLGAPGTPGLP |
| | | GPRGDPGFQGFPGVKGEKGNPGFLGSI |
| 1933 | COL4A3_4 | VKGEKGNPGFLGSIGPPGPIGPKGPPGVRGDPGTLKI |
| | | ISLPGSPGPPGTPGEPGMQGEPGPP |
| | GRIN2C | GRRAPPPSPCPTPRSGPSPCLPTPDPPPEPSPTGWGPP |
| | | DGGRAALVRRAPQPPGRPPTPGPP |
| 1934 | LRRC37B_0 | VEVTMTSEPKNETESTQAQQEAPIQPPEEAEPSSTAL |
| | | RTTDPPPEHPEVTLPPSDKGQAQHS |
| 1935 | LRRC37B_1 | NETESTQAQQEAPIQPPEEAEPSSTALRTTDPPPEHPE |
| | | VTLPPSDKGQAQHSHLTEATVQPL |
| | SOHLH1 | DPGTGASSGTRTPDVKAFLESPWSLDPASASPEPVP |
| | | HILASSRQWDPASCTSLGTDKCEALL |
| | ZNF469_0 | QPAAEELGFHRCFQEPPSSFTSTNYTSPSATPRPPAP |
| | | GPPQSRGTSPLQPGSYPEYQASGAD |
| | ZNF469_1 | QGGSQGALGTAGKTPGPREKLPAVRSSQGGSPALFT |
| | | YNGMTDPGAQPLFFGVAQPQVSPHGT |
| 1936 | ZNF469_2 | ESQLPGPLGPSAFFHPPTHPQETGSPFPSPEPPHSLPT |
| | | HYQPEPAKAFPFPADGLGAEGAFQ |
| 1937 | ZNF469_3 | RGPSSGHPLKSKAGVTPESKAPPPLPAATPDPQTPRP |
| | | GDRGCPARGRPKTRSLGLAPTEADA |
| | ZNF469_4 | GDLAACAPSPTSAAHMPCSLGPLPREDPLTSPSRAQ |
| | | GGLGGQLPASPSCRDPPGPQQLLACS |
| 1938 | ZNF469_5 | LQGLPDNPDTQGGVQGPEGPTPDASGSSAKDPPSLF |
| | | DDEVSFSQLFPPGGRLTRKRNPHVYG |
| | ZNF469_6 | PGPARSESVGSFGRAPSAPDKPPRTPRKQATPSRVLP |
| | | TKPKPNSQNKPRPPPSEQRKAEPGH |
| 1939 | PWWP3A | SGVREDDPCANAEGHDPGLPLGSLTAPPAPEPSACS |
| | | EPGECPAKKRPRLDGSQRPPAVQLEP |
| 1940 | APC2_0 | IDKELLEAQDRVQQTEPQALLAVKSVPVDEDPETEV |
| | | PTHPEDGTPQPGNSKVEVVFWLLSML |
| 1941 | APC2_1 | APPPARTQPSLIADETPPCYSLSSSASSLSEPEPSEPPA |
| | | VHPRGREPAVTKDPGPGGGRDSS |
| 1942 | APC2_2 | RTQPSLIADETPPCYSLSSSASSLSEPEPSEPPAVHPR |
| | | GREPAVTKDPGPGGGRDSSPSPRA |
| 1943 | APC2_3 | TPPCYSLSSSASSLSEPEPSEPPAVHPRGREPAVTKDP |
| | | GPGGGRDSSPSPRAAEELLQRCIS |
| | CCDC80 | VTRSTSRAVTVAARPMTTTAFPTTQRPWTPSPSHRP |
| | | PTTTEVITARRPSVSENLYPPSRKDQ |
| 1944 | POU5F1B_0 | MAGHLASDFAFSPPPGGGGDGPWGAEPGWVDPLT |
| | | WLSFQGPPGGPGIGPGVGPGSEVWGIPP |
| | POU5F1B_1 | YAQREDFEAAGSPFSGGPVSFPPAPGPHFGTPGYGSP |
| | | HFTALYSSVPFPEGEVFPPVSVITL |
| | POU5F1B_2 | DFEAAGSPFSGGPVSFPPAPGPHFGTPGYGSPHFTAL |
| | | YSSVPFPEGEVFPPVSVITLGSPMH |
| | COL4A4_0 | GRKGESGIGAKGEKGIPGFPGPRGDPGSYGSPGFPGL |
| | | KGELGLVGDPGLFGLIGPKGDPGNR |
| 1945 | COL4A4_1 | PPGCPGDHGMPGLRGQPGEMGDPGPRGLQGDPGIP |
| | | GPPGIKGPSGSPGLNGLHGLKGQKGTK |
| 1946 | COL4A4_2 | PHGFPGPPGEKGLPGPPGRKGPTGLPGPRGEPGPPA |
| | | DVDDCPRIPGLPGAPGMRGPEGAMGL |
| | SULT1A4 | KCNRAPIYVRVPFLEVNDPGEPSGLETLKDTPPPRLI |
| | | KSHLPLALLPQTLLDQKVKVVYVAR |
| | SULT1A3 | KCNRAPIYVRVPFLEVNDPGEPSGLETLKDTPPPRLI |
| | | KSHLPLALLPQTLLDQKVKVVYVAR |
| | ADGRL1_0 | GPPDPSAGPATSPPLSTTTTARPTPLTSTASPAATTPL |
| | | RRAPLTTHPVGAINQLGPDLPPAT |
| | ADGRL1_1 | SAGPATSPPLSTTTTARPTPLTSTASPAATTPLRRAPL |
| | | TTHPVGAINQLGPDLPPATAPVPS |
| 1947 | ODF3 | HKTPGPAAYRQTDVRVTKFKAPQYTMAARVEPPG |
| | | DKTLKPGPGAHSPEKVTLTKPCAPVVTF |
| 1948 | COL1A2_0 | PMGLMGPRGPPGAAGAPGPQGFQGPAGEPGEPGQT |
| | | GPAGARGPAGPPGKAGEDGHPGKPGRP |
| | COL1A2_1 | ASGPAGVRGPNGDAGRPGEPGLMGPRGLPGSPGNI |
| | | GPAGKEGPVGLPGIDGRPGPIGPAGAR |
| | WIZ_0 | CLIKKEPPAGDLAPALAEDGPPTVAPGPVQSPLPLSP |
| | | LAGRPGKPGAGPAQVPRELSLTPIT |
| | WIZ_1 | EPPAGDLAPALAEDGPPTVAPGPVQSPLPLSPLAGRP |
| | | GKPGAGPAQVPRELSLTPITGAKPS |
| | CBLL2 | DHIQNNSDSGAKKPTPPDYYPECQSQPAVSSPHHIIP |
| | | QKQHYAPPPSPSSPVNHQMPYPPQD |
| | ATXN7_0 | SAVGPTCPATVSSLVKPGLNCPSIPKPTLPSPGQILNG |
| | | KGLPAPPTLEKKPEDNSNNRKFLN |
| | ATXN7_1 | KPHTPSLPRPPGCPAQQGGSAPIDPPPVHESPHPPLPA |
| | | TEPASRLSSEEGEGDDKEESVEKL |
| 1949 | CHRDL2_0 | YCLRCTCSEGAHVSCYRLHCPPVHCPQPVTEPQQCC |
| | | PKCVEPHTPSGLRAPPKSCQHNGTMY |
| 1950 | CHRDL2_1 | AHVSCYRLHCPPVHCPQPVTEPQQCCPKCVEPHTPS |
| | | GLRAPPKSCQHNGTMYQHGEIFSAHE |
| | FLRT2 | MAVRELNMNLLSCPTTTPGLPLFTPAPSTASPTTQPP |
| | | TLSIPNPSRSYTPPTPTTSKLPTIP |
| | GRB10_0 | VRRLQEEDQQFRTSSLPAIPNPFPELCGPGSPPVLTPG |
| | | SLPPSQAAAKQDVKVFSEDGTSKV |
| | GRB10_1 | EEDQQFRTSSLPAIPNPFPELCGPGSPPVLTPGSLPPS |
| | | QAAAKQDVKVFSEDGTSKVVEILA |
| | TNFRSF10C_0 | CTSWDDIQCVEEFGANATVETPAAEETMNTSPGTPA |
| | | PAAEETMNTSPGTPAPAAEETMTTSP |
| | TNFRSF10C_1 | NATVETPAAEETMNTSPGTPAPAAEETMNTSPGTPA |
| | | PAAEETMTTSPGTPAPAAEETMTTSP |
| | TNFRSF10C_2 | SPGTPAPAAEETMNTSPGTPAPAAEETMTTSPGTPA |
| | | PAAEETMTTSPGTPAPAAEETMITSP |
| | TNFRSF10C_3 | SPGTPAPAAEETMTTSPGTPAPAAEETMTTSPGTPAP |
| | | AAEETMITSPGTPASSHYLSCTIVG |
| | PIK3C2B | SGKPVARSKTMPPQVPPRTYASRYGNRKNATPGKN |
| | | RRISAAPVGSRPHTVANGHELFEVSEE |
| | PRPF40B | AGKQQQQLPQTLQPQPPQPQPDPPPVPPGPTPVPTG |
| | | LLEPEPGGSEDCDVLEATQPLEQGFL |
| | OLFML2B | SVLQPSPQVPATTVAHTATQQPAAPAPPAVSPREAL |
| | | MEAMHTVPVPPTTVRTDSLGKDAPAG |
| | GRIN2D | RYYGPIEPQGLGLGLGEARAAPRGAAGRPLSPPAAQ |
| | | PPQKPPPSYFAIVRDKEPAEPPAGAF |
| 1951 | CISH | VASCTADTRSDSPDPAPTPALPMPKEDAPSDPALPA |
| | | PPPATAVHLKLVQPFVRRSSARSLQH |
| 1952 | RRBP1 | KKGKTKKKEEKPNGKIPDHDPAPNVTVLLREPVRA |
| | | PAVAVAPTPVQPPIIVAPVATVPAMPQ |
| | GFY | LLAGLRSKAAPSAPLPLGCGFPDMAHPSETSPLKGA |
| | | SENSKRDRLNPEFPGTPYPEPSKLPH |
| 1953 | FRMD7 | QVFFYVDKPPQVPRWSPIRAEERTSPHSYVEPTAMK |
| | | PAERSPRNIRMKSFQQDLQVLQEAIA |
| | TBXT | NHRWKYVNGEWVPGGKPEPQAPSCVYIHPDSPNFG |
| | | AHWMKAPVSFSKVKLTNKLNGGGQIML |
| 1954 | PLPPR3 | DLLAPRSPMAKENMVTFSHTLPRASAPSLDDPARRH |
| | | MTIHVPLDASRSKQLISEWKQKSLEG |
| 1955 | FREM1_0 | DYDRMASLECTVSLDTARTRLPAHGQMVLGEPRPE |
| | | EPRGDQPHSFFPESQLRAKLKCPGGSC |
| 1956 | FREM1_1 | ASLECTVSLDTARTRLPAHGQMVLGEPRPEEPRGDQ |
| | | PHSFFPESQLRAKLKCPGGSCTPGLK |
| 1957 | NAPSA | QGLLDKPVFSFYLNRDPEEPDGGELVLGGSDPAHYI |
| | | PPLTFVPVTVPAYWQIHMERVKVGPG |
| | ARHGAP44 | GTACAGTQPGAQPGAQPGASPSPSQPPADQSPHTLR |
| | | KVSKKLAPIPPKVPFGQPGAMADQSA |
| | ASCL2 | VRNALAGGLRPQAVRPSAPRGPPGTTPVAASPSRAS |
| | | SSPGRGGSSEPGSPRSAYSSDDSGCE |
| 1958 | PIP4P1 | PGGGLTPSAPPYGAAFPPFPEGHPAVLPGEDPPPYSP |
| | | LTSPDSGSAPMITCRVCQSLINVEG |
| 1959 | ASXL3 | KEKRARIEDDQSTRNISSSSPPEKEQPPREEPRVPPLK |
| | | IQLSKIGPPFIIKSQPVSKPESRA |
| | DOK3 | AIARQRERLPELTRPQPCPLPRATSLPSLDTPGELRE |
| | | MPPGPEPPTSRKMHLAEPGPQSLPL |
| 1960 | HS6ST3 | PEGPRGAAAPEEEDEEPGDPREGEEEEEEDEPDPEAP |
| | | ENGSLPRFVPRFNFSLKDLTRFVDF |
| | DLX5 | VFDRRVPSIRSGDFQAPFQTSAAMHHPSQESPTLPES |
| | | SATDSDYYSPTGGAPHGYCSPTSAS |
| | MAP3K14 | SLAHAGVALAKPLPRTPEQESCTIPVQEDESPLGAPY |
| | | VRNTPQFTKPLKEPGLGQLCFKQLG |
| 1961 | XAGE3 | WRGRSTYRPRPRRSVPPPELIGPMLEPGDEEPQQEEP |
| | | PTESRDPAPGQEREEDQGAAETQVP |
| | PAX9 | LAQQGHYDSYKQHQPTPQPALPYNHIYSYPSPITAA |
| | | AAKVPTPPGVPAIPGSVAMPRTWPSS |
| 1962 | ARHGEF15_0 | SRASLDSQTSPDSPSSTPTPSPVSRRSASPEPAPRSPV |
| | | PPPKPSGSPCTPLLPMAGVLAQNG |
| | ARHGEF15_1 | DSQTSPDSPSSTPTPSPVSRRSASPEPAPRSPVPPPKPS |
| | | GSPCTPLLPMAGVLAQNGSASAP |
| 1963 | NEDD9_0 | EGVYDIPPTCTKPAGKDLHVKYNCDIPGAAEPVARR |
| | | HQSLSPNHPPPQLGQSVGSQNDAYDV |
| | NEDD9_1 | TKPAGKDLHVKYNCDIPGAAEPVARRHQSLSPNHPP |
| | | PQLGQSVGSQNDAYDVPRGVQFLEPP |
| | MUC7_0 | NTSSSVATLAPVNSPAPQDTTAAPPTPSATTPAPPSS |
| | | SAPPETTAAPPTPSATTQAPPSSSA |
| | MUC7_1 | ETTAAPPTPSATTQAPPSSSAPPETTAAPPTPPATTPA |
| | | PPSSSAPPETTAAPPTPSATTPAP |
| | MUC7_2 | PPTPSATTQAPPSSSAPPETTAAPPTPPATTPAPPSSSA |
| | | PPETTAAPPTPSATTPAPLSSSA |
| | MUC7_3 | ETTAAPPTPPATTPAPPSSSAPPETTAAPPTPSATTPA |
| | | PLSSSAPPETTAVPPTPSATTLDP |
| | MUC7_4 | PPTPPATTPAPPSSSAPPETTAAPPTPSATTPAPLSSSA |
| | | PPETTAVPPTPSATTLDPSSASA |
| | MUC7_5 | PPTPSATTLDPSSASAPPETTAAPPTPSATTPAPPSSP |
| | | APQETTAAPITTPNSSPTTLAPDT |
| | RCAN2 | KLYFAQVQTPETDGDKLHLAPPQPAKQFLISPPSSPP |
| | | VGWQPINDATPVLNYDLLYAVAKLG |
| 1964 | RPH3AL | AWFYKGLPKYILPLKTPGRADDPHFRPLPTEPAERE |
| | | PRSSETSRIYTWARGRVVSSDSDSDS |
| | MXRA8 | HLHHHYCGLHERRVFHLTVAEPHAEPPPRGSPGNGS |
| | | SHSGAPGPDPTLARGHNVINVIVPES |
| | STON1_0 | EFPSGSSSTSSTPLSSPIVDFYFSPGPPSNSPLSTPTKD |
| | | FPGFPGIPKAGTHVLYPIPESSS |
| | STON1_1 | ISGGESSLLPTRPTCLSHALLPSDHSCTHPTPKVGLPD |
| | | EVNPQQAESLGFQSDDLPQFQYFR |
| | MYBPC1 | MPEPTKKEENEVPAPAPPPEEPSKEKEAGTTPAKDW |
| | | TLVETPPGEEQAKQNANSQLSILFIE |
| | SIMC1_0 | DVPGLPQSILHPQDVAYLQDMPRSPGDVPQSPSDVS |
| | | PSPDAPQSPGGMPHLPGDVLHSPGDM |
| | SIMC1_1 | PQSILHPQDVAYLQDMPRSPGDVPQSPSDVSPSPDA |
| | | PQSPGGMPHLPGDVLHSPGDMPHSSG |
| | SIMC1_2 | GDRPDFTQNDVQNRDMPMDISALSSPSCSPSPQSET |
| | | PLEKVPWLSVMETPARKEISLSEPAK |
| 1966 | KRTAP2-2 | TCQTTVCRPVTCVPRCTRPICEPCRRPVCCDPCSLQE |
| | | GCCRPITCCPSSCTAVVCRPCCWAT |
| | CHPF2_0 | FFPVHFQEFNPALSPQRSPPGPPGAGPDPPSPPGADPS |
| | | RGAPIGGRFDRQASAEGCFYNADY |
| 1967 | CHPF2_1 | FQEFNPALSPQRSPPGPPGAGPDPPSPPGADPSRGAPI |
| | | GGRFDRQASAEGCFYNADYLAARA |
| | SPATA22 | GCLPVPLFNQKKRNRQPLTSNPLKDDSGISTPSDNY |
| | | DFPPLPTDWAWEAVNPELAPVMKTVD |
| | TOGARAM1 | QNPSPGAYILPSYPVSSPRTSPKHTSPLIISPKKSQDNS |
| | | VNFSNSWPLKSFEGLSKPSPQKK |
| 1968 | HS3ST6 | ALVLGAYCLCALPGRCPPAARAPAPAPAPSEPSSSV |
| | | HRPGAPGLPLASGPGRRRFPQALIVG |
| | ZCWPW1 | QNKEECGKGPKRIFAPPAQKSYSLLPCSPNSPKEETP |
| | | GISSPETEARISLPKASLKKKEEKA |
| 1969 | TGFBR3L | LHTLTQPIVVTVPRPPPRPPKSVPGRAVRPEPPAPAP |
| | | AALEPAPVVALVLAAFVLGAALAAG |
| 1970 | EFCAB8 | SSLSPESVANTNLRRSLVSAPPVMRCPRDKEPDRPV |
| | | PQQKPSSASGTSRQSSKIHSKQSIYK |
| | LTBR_0 | TGGSMTITGNIYIYNGPVLGGPPGPGDLPATPEPPYPI |
| | | PEEGDPGPPGLSTPHQEDGKAWHL |
| 1971 | LTBR_1 | GSMTITGNIYIYNGPVLGGPPGPGDLPATPEPPYPIPE |
| | | EGDPGPPGLSTPHQEDGKAWHLAE |
| 1972 | LTBR_2 | IYNGPVLGGPPGPGDLPATPEPPYPIPEEGDPGPPGLS |
| | | TPHQEDGKAWHLAETEHCGATPSN |
| | TSPOAP1 | PPPCCCSIPQPCRGSGPKDLDLPPGSPGRCTPKSSEPA |
| | | PATLTGVPRRTAKKAESLSNSSHS |
| | NLRP1 | TSGRRWREISASLLYQALPSSPDHESPSQESPNAPTS |
| | | TAVLGSWGSPPQPSLAPREQEAPGT |
| | PLXND1_0 | VYLAAVNRLYQLSGANLSLEAEAAVGPVPDSPLCH |
| | | APQLPQASCEHPRRLTDNYNKILQLDP |
| | PLXND1_1 | LSAQWPCFWCSQQHSCVSNQSRCEASPNPTSPQDCP |
| | | RTLLSPLAPVPTGGSQNILVPLANTA |
| | PLXND1_2 | SQQHSCVSNQSRCEASPNPTSPQDCPRTLLSPLAPVP |
| | | TGGSQNILVPLANTAFFQGAALECS |
| | FLI1 | LSVVSDDQSLFDSAYGAAAHLPKADMTASGSPDYG |
| | | QPHKINPLPPQQEWINQPVRVNVKREY |
| 1973 | PANX2 | LSQAEDCGLGLAPAPIKDAPLPEKEIPYPTEPARAGL |
| | | PSGGPFHVRSPPAAPAVAPLTPASL |
| 1974 | CACNA1H | EGKGSTDDEAEDGRAAPGPRATPLRRAESLDPRPLR |
| | | PAALPPTKCRDRDGQVVALPSDFFLR |
| 1975 | COL7A1_0 | RPGSPGRAGNPGTPGAPGLKGSPGLPGPRGDPGERG |
| | | PRGPKGEPGAPGQVIGGEGPGLPGRK |
| 1976 | COL7A1_1 | QVIGGEGPGLPGRKGDPGPSGPPGPRGPLGDPGPRG |
| | | PPGLPGTAMKGDKGDRGERGPPGPGE |
| 1977 | COL7A1_2 | GPAGPRGATGVQGERGPPGLVLPGDPGPKGDPGDR |
| | | GPIGLTGRAGPPGDSGPPGEKGDPGRP |
| 1978 | COL7A1_3 | ERGEQGRDGPPGLPGTPGPPGPPGPKVSVDEPGPGL |
| | | SGEQGPPGLKGAKGEPGSNGDQGPKG |
| | COL7A1_4 | GPPGRGLTGPTGAVGLPGPPGPSGLVGPQGSPGLPG |
| | | QVGETGKPGAPGRDGASGKDGDRGSP |
| | COL7A1_5 | GEPGDPGEDGQKGAPGPKGFKGDPGVGVPGSPGPP |
| | | GPPGVKGDLGLPGLPGAPGVVGFPGQT |
| 1979 | CDH2 | RDNILKYDEEGGGEEDQDYDLSQLQQPDTVEPDAIK |
| | | PVGIRRMDERPIHAEPQYPVRSAAPH |
| 1980 | FBXO24 | RECLYILSSHDIEQHAPYRHLPASRVVGTPEPSLGAR |
| | | APQDPGGMAQACEEYLSQIHSCQTL |
| | USP30 | LLGHKPSQHNPKLNKNPGPTLELQDGPGAPTPVLNQ |
| | | PGAPKTQIFMNGACSPSLLPTLSAPM |
| | NPAPI | GLTSPSVQPLSGSIIPPGFAELTSPYTALGTPVNAEPV |
| | | EGHNASAFPNGTAKTSGFRIATGM |
| | RBMS3 | AASPVSTYQVQSTSWMPHPPYVMQPTGAVITPTMD |
| | | HPMSMQPANMMGPLTQQMNHLSLGTTG |
| 1981 | SAC3D1 | PAAERAQREREHRLHRLEVVPGCRQDPPRADPQRA |
| | | VKEYSRPAAGKPRPPPSQLRPPSVLLA |
| 1982 | SP7 | PAGSPPAPTSGYANDYPPFSHSFPGPTGTQDPGLLVP |
| | | KGHSSSDCLPSVYTSLDMTHPYGSW |
| | ANKLE1_0 | VPRSQGTEAELNARLQALTLTPPNAAGFQSSPSSMP |
| | | LLDRSPAHSPPRTPTPGASDCHCLWE |
| | ANKLE1_1 | LNARLQALTLTPPNAAGFQSSPSSMPLLDRSPAHSPP |
| | | RTPTPGASDCHCLWEHQTSIDSDMA |
| | MEF2B | SGGRSLGEEGPPTRGASPPTPPVSIKSERLSPAPGGPG |
| | | DFPKTFPYPLLLARSLAEPLRPGP |
| | VGLL2_0 | LAYYSKMQEAQECNASPSSSGSGSSSFSSQTPASIKE |
| | | EEGSPEKERPPEAEYINSRCVLFTY |
| 1983 | VGLL2_1 | MPAASGRPARLATAPAPAPGSPPCELSGKGEPAGAA |
| | | WAGPGGPFASPSGDVAQGLGLSVDSA |
| | ESRRB | RGSPKDERMSSHDGKCPFQSAAFTSRDQSNSPGIPN |
| | | PRPSSPTPLNERGRQISPSTRTPGGQ |
| | GALNT6 | RDSMPKLQIRAPEAQQTLFSINQSCLPGFYTPAELKP |
| | | FWERPPQDPNAPGADGKAFQKSKWT |
| | RBM38 | TYGLTPHYIYPPAIVQPSVVIPAAPVPSLSSPYIEYTP |
| | | ASPAYAQYPPATYDQYPYAASPAT |
| | COL18A1_0 | PGGRVKEGGLKGQKGEPGVPGPPGRAGPPGSPCLP |
| | | GPPGLPCPVSPLGPAGPALQTVPGPQG |
| | COL18A1_1 | CPVSPLGPAGPALQTVPGPQGPPGPPGRDGTPGRDG |
| | | EPGDPGEDGKPGDTGPQGFPGTPGDV |
| | COL18A1_2 | KGEPGDASLGFGMRGMPGPPGPPGPPGPPGTPVYDS |
| | | NVFAESSRPGPPGLPGNQGPPGPKGA |
| | ZMAT4 | DSHYQGKIHAKRLKLLLGEKTPLKTTATPLSPLKPP |
| | | RMDTAPVVASPYQRRDSDRYCGLCAA |
| 1984 | GAB4 | FLGNISSASHGLCSSPAEPSCSHQHLPQEQEPTSEPPV |
| | | SHCVPPTWPIPAPPGCLRSHQHAS |
| 1985 | CT47B1 | LGLIQEAASVQEAASVPEPAVPADLAEMAREPAEEA |
| | | ADEKPPEEAAEEKLTEEATEEPAAEE |
| 1986 | KRTAP16-1_0 | CQDSCGSSSCGPQCRQPSCPVSSCAQPLCCDPVICEP |
| | | SCSVSSGCQPVCCEATTCEPSCSVS |
| 1987 | KRTAP16-1_1 | GSSSCGPQCRQPSCPVSSCAQPLCCDPVICEPSCSVSS |
| | | GCQPVCCEATTCEPSCSVSNCYQP |
| 1988 | KRTAP16-1_2 | QPVCFEATICEPSCSVSNCCQPVCFEATVCEPSCSVS |
| | | SCAQPVCCEPAICEPSCSVSSCCQP |
| 1989 | KRTAP16-1_3 | VSNCCQPVCFEATVCEPSCSVSSCAQPVCCEPAICEP |
| | | SCSVSSCCQPVGSEATSCQPVLCVP |
| 1990 | KRTAP16-1_4 | QPVCFEATVCEPSCSVSSCAQPVCCEPAICEPSCSVS |
| | | SCCQPVGSEATSCQPVLCVPTSCQP |
| 1991 | KRTAP16-1_5 | EATSCQPVLCVPTSCQPVLCKSSCCQPVVCEPSCCS |
| | | AVCTLPSSCQPVVCEPSCCQPVCPTP |
| 1992 | KRTAP16-1_6 | KSSCCQPVVCEPSCCSAVCTLPSSCQPVVCEPSCCQP |
| | | VCPTPTCSVTSSCQAVCCDPSPCEP |
| | KRTAP16-1_7 | EPSCCSAVCTLPSSCQPVVCEPSCCQPVCPTPTCSVT |
| | | SSCQAVCCDPSPCEPSCSESSICQP |
| 1993 | KRTAP16-1_8 | QPVVCEPSCCQPVCPTPTCSVTSSCQAVCCDPSPCEP |
| | | SCSESSICQPATCVALVCEPVCLRP |
| 1994 | KRTAP16-1_9 | QAVCCDPSPCEPSCSESSICQPATCVALVCEPVCLRP |
| | | VCCVQSSCEPPSVPSTCQEPSCCVS |
| 1995 | KRTAP16-1_10 | ESSICQPATCVALVCEPVCLRPVCCVQSSCEPPSVPS |
| | | TCQEPSCCVSSICQPICSEPSPCSP |
| 1996 | KRTAP16-1_11 | VALVCEPVCLRPVCCVQSSCEPPSVPSTCQEPSCCVS |
| | | SICQPICSEPSPCSPAVCVSSPCQP |
| 1997 | KRTAP16-1_12 | VQSSCEPPSVPSTCQEPSCCVSSICQPICSEPSPCSPAV |
| | | CVSSPCQPTCYVVKRCPSVCPEP |
| | KRTAP16-1_13 | EPPSVPSTCQEPSCCVSSICQPICSEPSPCSPAVCVSSP |
| | | CQPTCYVVKRCPSVCPEPVSCPS |
| 1998 | KRTAP16-1_14 | EPSPCSPAVCVSSPCQPTCYVVKRCPSVCPEPVSCPS |
| | | TSCRPLSCSPGSSASAICRPTCPRT |
| | KRTAP16-1_15 | QPTCYVVKRCPSVCPEPVSCPSTSCRPLSCSPGSSAS |
| | | AICRPTCPRTFYIPSSSKRPCSATI |
| | AJM1 | APGPRREDPLGRGRSYENLLGREVREPRGVSPEGRR |
| | | PPVVVNLSTSPRRYAALSLSETSLTE |
| | C11orf91 | GLGPSSERPWPSPWPSGLASIPYEPLRFFYSPPPGPEV |
| | | VASPLVPCPSTPRLASASHPEELC |
| | ADPGK | LLEPELPGSALRSLWSSLCLGPAPAPPGPVSPEGRLA |
| | | AAWDALIVRPVRRWRRVAVGVNACV |
| 1999 | QSOX1 | TNTTPHVPAEGPEASRPPKLHPGLRAAPGQEPPEHM |
| | | AELQRNEQEQPLGQWHLSKRDTGAAL |
| | TGM1 | GDIGGNETVTLRQSFVPVRPGPRQLIASLDSPQLSQV |
| | | HGVIQVDVAPAPGDGGFFSDAGGDS |
| | CACNA1C | LVHHQALAVAGLSPLLQRSHSPASFPRPFATPPATPG |
| | | SRGWPPQPVPTLRLEGVESSEKLNS |
| | F12_0 | AAPPTPVSPRLHVPLMPAQPAPPKPQPTTRTPPQSQT |
| | | PGALPAKREQPPSLTRNGPLSCGQR |
| | F12_1 | VSPRLHVPLMPAQPAPPKPQPTTRTPPQSQTPGALPA |
| | | KREQPPSLTRNGPLSCGQRLRKSLS |
| | DOT1L_0 | KNQTALDALHAQTVSQTAASSPQDAYRSPHSPFYQ |
| | | LPPSVQRHSPNPLLVAPTPPALQKLLE |
| 2000 | DOT1L_1 | IGLAKSADSPLQASSALSQNSLFTFRPALEEPSADAK |
| | | LAAHPRKGFPGSLSGADGLSPGTNP |
| | TCF7L1_0 | FAEVRRPQDSAFFKGPPYPGYPFLMIPDLSSPYLSNG |
| | | PLSPGGARTYLQMKWPLLDVPSSAT |
| 2001 | TCF7L1_1 | HHMHPLTPLITYSNDHFSPGSPPTHLSPEIDPKTGIPR |
| | | PPHPSELSPYYPLSPGAVGQIPHP |
| | TCF7L1_2 | HFSPGSPPTHLSPEIDPKTGIPRPPHPSELSPYYPLSPG |
| | | AVGQIPHPLGWLVPQQGQPMYSL |
| | CBARP_0 | PFLASPPPALGRYFSVDGGARGGPVGPCPPSPPPRRP |
| | | RERSPGPVDTRSPASSGKAPPRGGL |
| | CBARP_1 | GRYFSVDGGARGGPVGPCPPSPPPRRPRERSPGPVD |
| | | TRSPASSGKAPPRGGLTGATSPAWTR |
| 2002 | SHF_0 | GSGGVAKWLREHLGFRGGGGGGGGSKPAPPEPDY |
| | | RPPAPSPAAPPAPPPDILAAYRLQRERD |
| | SHF_1 | FEDPYSGGSSGSAALATPVAPGPTPPPRHGSPPHRLI |
| | | RVETPGPPAPPADERISGPPASSDR |
| | SHF_2 | GSAALATPVAPGPTPPPRHGSPPHRLIRVETPGPPAP |
| | | PADERISGPPASSDRLAILEDYADP |
| 2003 | SHF_3 | SCLSPGREEKGRLPPRLSAGNPKSAKPLSMEPSSPLG |
| | | EWTDPALPLENQVWYHGAISRTDAE |
| | PTOV1 | RSGAGGPLGGRGRPPRPLVVRAVRSRSWPASPRGP |
| | | QPPRIRARSAPPMEGARVFGALGPIGP |
| 2004 | EDIL3 | LADGSFSCECPDGFTDPNCSSVVEVASDEEEPTSAGP |
| | | CTPNPCHNGGTCEISEAYRGDTFIG |
| | HOXB13 | PAVNYAPLDLPGSAEPPKQCHPCPGVPQGTSPAPVP |
| | | YGYFGGGYYSCRVSRSSLKPCAQAAT |
| 2005 | NUDT15 | SFIEKENYHYVTILMKGEVDVTHDSEPKNVEPEKNE |
| | | SWEWVPWEELPPLDQLFWGLRCLKEQ |
| | ELAVL4 | FRLDNLLNMAYGVKRLMSGPVPPSACPPRFSPITIDG |
| | | MTSLVGMNIPGHTGTGWCIFVYNLS |
| 2006 | PDX1 | PPHPFPGALGALEQGSPPDISPYEVPPLADDPAVAHL |
| | | HHHLPAQLALPHPPAGPFPEGAEPG |
| | PNPLA1 | PAQPLASSTPLSLSGMPPVSFPAVHKPPSSTPGSSLPT |
| | | PPPGLSPLSPQQQVQPSGSPARSL |
| | CHRD | VLCACEAPQWGRRTRGPGRVSCKNIKPECPTPACG |
| | | QPRQLPGHCCQTCPQERSSSERQPSGL |
| | ALOX12 | AAPLVMLKMEPNGKLQPMVIQIQPPNPSSPTPTLFLP |
| | | SDPPLAWLLAKSWVRNSDFQLHEIQ |
| 2007 | PM20D1 | GSGTVVTVLQQLANEFPFPVNIILSNPWLFEPLISRF |
| | | MERNPLTNAIIRTTTALTIFKAGVK |
| 2008 | COL8A2_0 | GPPGFSRMGKAGPPGLPGKVGPPGQPGLRGEPGIRG |
| | | DQGLRGPPGPPGLPGPSGITIPGKPG |
| 2009 | COL8A2_1 | MPGLPGPKGDRGPAGVPGLLGDRGEPGEDGEPGEQ |
| | | GPQGLGGPPGLPGSAGLPGRRGPPGPK |
| | COL8A2_2 | GEPGLPGPPGEGRAGEPGTAGPTGPPGVPGSPGITGP |
| | | PGPPGPPGPPGAPGAFDETGIAGLH |
| 2010 | COL17A1 | DRGFPGTPGIPGPLGHPGPQGPKGQKGSVGDPGME |
| | | GPMGQRGREGPMGPRGEAGPPGSGEKG |
| | NLGN4X | HNLNEIFQYVSTTTKVPPPDMTSFPYGTRRSPAKIWP |
| | | TTKRPAITPANNPKHSKDPHKTGPE |
| 2011 | SULF1 | HIGQFGLVKGKSMPYDFDIRVPFFIRGPSVEPGSIVP |
| | | QIVLNIDLAPTILDIAGLDTPPDVD |
| 2012 | ANTXR2 | VRWGDKGSTEEGARLEKAKNAVVKIPEETEEPIRPR |
| | | PPRPKPTHQPPQTKWYTPIKGRLDAL |
| | SMAD1 | RNLGQNEPHMPLNATFPDSFQQPNSHPFPHSPNSSY |
| | | PNSPGSSSSTYPHSPTSSDPGSPFQM |
| | NID2_0 | QGNFLPLQCHGSTGFCWCVDPDGHEVPGTQTPPGS |
| | | TPPHCGPSPEPTQRPPTICERWRENLL |
| | NID2_1 | PLQCHGSTGFCWCVDPDGHEVPGTQTPPGSTPPHCG |
| | | PSPEPTQRPPTICERWRENLLEHYGG |
| 2013 | NDST1_0 | LFIFCLFSVFISAYYLYGWKRGLEPSADAPEPDCGDP |
| | | PPVAPSRLLPLKPVQAATPSRTDPL |
| 2014 | NDST1_1 | LFSVFISAYYLYGWKRGLEPSADAPEPDCGDPPPVA |
| | | PSRLLPLKPVQAATPSRTDPLVLVFV |
| 2015 | RNF38_0 | GRRDRLSRHNSISQDENYHHLPYAQQQAIEEPRAFH |
| | | PPNVSPRLLHPAAHPPQQNAVMVDIH |
| | RNF38_1 | SISQDENYHHLPYAQQQAIEEPRAFHPPNVSPRLLHP |
| | | AAHPPQQNAVMVDIHDQLHQGTVPV |
| 2016 | FAM20C_0 | KHTLRILQDFSSDPSSNLSSHSLEKLPPAAEPAERAL |
| | | RGRDPGALRPHDPAHRPLLRDPGPR |
| 2017 | FAM20C_1 | SSDPSSNLSSHSLEKLPPAAEPAERALRGRDPGALRP |
| | | HDPAHRPLLRDPGPRRSESPPGPGG |
| 2018 | TNFRSF13C | KDAPEPLDKVIILSPGISDATAPAWPPPGEDPGTTPP |
| | | GHSVPVPATELGSTELVTTKTAGPE |
| | NOCT | HSPRRLCSALLQRDAPGLRRLPAPGLRRPLSPPAAVP |
| | | RPASPRLLAAASAASGAARSCSRTV |
| | ZNF746_0 | RPFTCTVCGKSFIRKDHLRKHQRNHAAGAKTPARG |
| | | QPLPTPPAPPDPFKSPASKGPLASTDL |
| 2019 | ZNF746_1 | DHLRKHQRNHAAGAKTPARGQPLPTPPAPPDPFKSP |
| | | ASKGPLASTDLVTDWTCGLSVLGPTD |
| 2020 | SNORC | VPQEPVPTLWNEPAELPSGEGPVESTSPGREPVDTGP |
| | | PAPTVAPGPEDSTAQERLDQGGGSL |
| 2021 | STK19 | SWKRHHLIPETFGVKRRRKRGPVESDPLRGEPGSAR |
| | | AAVSELMQLFPRGLFEDALPPIVLRS |
| | SSH2_0 | KFPDLTVEDLETDALKADMNVHLLPMEELTSPLKD |
| | | PPMSPDPESPSPQPSCQTEISDFSTDR |
| 2022 | SSH2_1 | ETDALKADMNVHLLPMEELTSPLKDPPMSPDPESPS |
| | | PQPSCQTEISDFSTDRIDFFSALEKF |
| | SSH2_2 | KADMNVHLLPMEELTSPLKDPPMSPDPESPSPQPSC |
| | | QTEISDFSTDRIDFFSALEKFVELSQ |
| | ARHGAP39 | TFAPEADGTIFFPERRPSPFLKRAELPGSSSPLLAQPR |
| | | KPSGDSQPSSPRYGYEPPLYEEPP |
| 2023 | NFXL1 | GHLCPAPCHDQALIKQTGRHQPTGPWEQPSEPAFIQ |
| | | TALPCPPCQVPIPMECLGKHEVSPLP |
| | WIPF1_0 | NRMPPPRPDVGSKPDSIPPPVPSTPRPIQSSPHNRGSP |
| | | PVPGGPRQPSPGPTPPPFPGNRGT |
| | WIPF1_1 | PPPVPSTPRPIQSSPHNRGSPPVPGGPRQPSPGPTPPPF |
| | | PGNRGTALGGGSIRQSPLSSSSP |
| | OBSCN_0 | GGSSSSSSSSDNELAPFARAKSLPPSPVTHSPLLHPRG |
| | | FLRPSASLPEEAEASERSTEAPAP |
| | OBSCN_1 | NLSDLYDIKYLPFEFMIFRKVPKSAQPEPPSPMAEEE |
| | | LAEFPEPTWPWPGELGPHAGLEITE |
| 2024 | OBSCN_2 | FEFMIFRKVPKSAQPEPPSPMAEEELAEFPEPTWPWP |
| | | GELGPHAGLEITEESEDVDALLAEA |
| | VWCE_0 | TATFPGEPGASPRLSPGPSTPPGAPTLPLASPGAPQPP |
| | | PVTPERSFSASGAQIVSRWPPLPG |
| | VWCE_1 | GTLLTEASALSMMDPSPSKTPITLLGPRVLSPTTSRL |
| | | STALAATTHPGPQQPPVGASRGEES |
| | PFKFB2_0 | YGCKVETIKLNVEAVNTHRDKPTNNFPKNQTPVRM |
| | | RRNSFTPLSSSNTIRRPRNYSVGSRPL |
| | PFKFB2_1 | NVEAVNTHRDKPTNNFPKNQTPVRMRRNSFTPLSSS |
| | | NTIRRPRNYSVGSRPLKPLSPLRAQD |
| | NCOA6 | MILSRAQLMPQGQMMVNPPSQNLGPSPQRMTPPKQ |
| | | MLSQQGPQMMAPHNQMMGPQGQVLLQQ |
| | CCDC120 | DNEEPHGCFSLAERPSPPKAWDQLRAVSGGSPERRT |
| | | PWKPPPSDLYGDLKSRRNSVASPTSP |
| 2025 | AHDC1 | LLADFLGRTEAACLSAPHLASPPATPKADKEPLEMA |
| | | RPPGPPRGPAAAAAGYGCPLLSDLTL |
| | ATXN7L2 | REVQGRAKDFDVLVAELKANSRKGESPKEKSPGRK |
| | | EQVLERPSQELPSSVQVVAAVAAPSST |
| 2026 | TRIM16 | KSCLTCMVNYCEEHLQPHQVNIKLQSHLLTEPVKD |
| | | HNWRYCPAHHSPLSAFCCPDQQCICQD |
| | STIL | FARPQMNTRFPSSRMVPFHFPPSKCALWNPTPTGDF |
| | | IYLHLSYYRNPKLVVTEKTIRLAYRH |
| 2027 | SCAF4 | TPPFPPMAQPVIPPTPPVQQPFQASFQAQNEPLTQKP |
| | | HQQEMEVEQPCIQEVKRHMSDNRKS |
| | EIF4G3_0 | KQEVLPLTLELEILENPPEEMKLECIPAPITPSTVPSFP |
| | | PTPPTPPASPPHTPVIVPAAATT |
| | EIF4G3_1 | LEILENPPEEMKLECIPAPITPSTVPSFPPTPPTPPASPP |
| | | HTPVIVPAAATTVSSPSAAITV |
| | PRKCQ | RDTEQIFREGPVEIGLPCSIKNEARPPCLPTPGKREPQ |
| | | GISWESPLDEVDKMCHLPEPELNK |
| | SCMH1 | KFPKKRGPKPGSKRKPRTLLNPPPASPTTSTPEPDTS |
| | | TVPQDAATIPSSAMQAPTVCIYLNK |
| | CABIN1 | CLVDEDSHSSAGTLPGPGASLPSSSGPGLTSPPYTAT |
| | | PIDHDYVKCKKPHQQATPDDRSQDS |
| | SMPD4_0 | TSDCAYFILVDRYLSWFLPTEGSVPPPLSSSPGGTSPS |
| | | PPPRTPAIPFASYGLHHTSLLKRH |
| | SMPD4_1 | YFILVDRYLSWFLPTEGSVPPPLSSSPGGTSPSPPPRT |
| | | PAIPFASYGLHHTSLLKRHISHQT |
| 2028 | THAP7_0 | FSDLLGPLGAQADEAGCSAQPSPERQPSPLEPRPVSP |
| | | SAYMLRLPPPAGAYIQNEHSYQVGS |
| | THAP7_1 | GPLGAQADEAGCSAQPSPERQPSPLEPRPVSPSAYM |
| | | LRLPPPAGAYIQNEHSYQVGSALLWK |
| | EIF4G2 | QSFLMNKNQVPKLQPQITMIPPSAQPPRTQTPPLGQT |
| | | PQLGLKTNPPLIQEKPAKTSKKPPP |
| 2029 | AKAP1_0 | RVCQASQLQGQKEESCVPVHQKTVLGPDTAEPATA |
| | | EAAVAPPDAGLPLPGLPAEGSPPPKTY |
| | AKAP1_1 | GPDTAEPATAEAAVAPPDAGLPLPGLPAEGSPPPKT |
| | | YVSCLKSLLSSPTKDSKPNISAHHIS |
| 2030 | TRAF4 | CDTCLQEFLSEGVFKCPEDQLPLDYAKIYPDPELEV |
| | | QVLGLPIRCIHSEEGCRWSGPLRHLQ |
| 2031 | OTUD7B | CVGGLPPYATFPRQCPPGRPYPHQDSIPSLEPGSHSK |
| | | DGLHRGALLPPPYRVADSYSNGYRE |
| 2032 | PRPF8 | FPPFDDEEPPLDYADNILDVEPLEAIQLELDPEEDAP |
| | | VLDWFYDHQPLRDSRKYVNGSTYQR |
| 2033 | CNOT11 | MYRTEPLAANPFAASFAHLLNPAPPARGGQEPDRPP |
| | | LSGFLPPITPPEKFFLSQLMLAPPRE |
| 2034 | MRPL19 | EKRLDDSLLYLRDALPEYSTFDVNMKPVVQEPNQK |
| | | VPVNELKVKMKPKPWSKRWERPNFNIK |
| 2035 | VARS1 | LEKFQQKQKIQQQQPPPGEKKPKPEKREKRDPGVIT |
| | | YDLPTPPGEKKDVSGPMPDSYSPRYV |
| 2036 | FRAS1_0 | LRGISEAGFLDDVVYDSTALGPGYDRPFQFDPSVRE |
| | | PKTIQLYKHLNLKSCVWTFDAYYDMT |
| 2037 | FRAS1_1 | EAGFLDDVVYDSTALGPGYDRPFQFDPSVREPKTIQ |
| | | LYKHLNLKSCVWTFDAYYDMTELIDV |
| | ZNF684_0 | GCPITKTKVILKVEQGQEPWMVEGANPHESSPESDY |
| | | PLVDEPGKHRESKDNFLKSVLLTFNK |
| 2038 | ZNF684_1 | LKVEQGQEPWMVEGANPHESSPESDYPLVDEPGKH |
| | | RESKDNFLKSVLLTFNKILTMERIHHY |
| | RGL2 | PSVSSLDSALESSPSLHSPADPSHLSPPASSPRPSRGH |
| | | RRSASCGSPLSGGAEEASGGTGYG |
| | MAP3K21 | TGATIISATGASALPLCPSPAPHSHLPREVSPKKHSTV |
| | | HIVPQRRPASLRSRSDLPQAYPQT |
| 2039 | PPDPF | RLGSTSSNSSCSSTECPGEAIPHPPGLPKADPGHWW |
| | | ASFFFGKSTLPFMATVLESAEHSEPP |
| 2040 | CRACDL_0 | EEGGVPGEDPSSRPATPELAEPESAPTLRVEPPSPPEG |
| | | PPNPGPDGGKQDGEAPPAGPCAPA |
| 2041 | CRACDL_1 | DTTPPETDPAATSEAPSARDGPERSVPKEAEPTPPVL |
| | | PDEEKGPPGPAPEPEREAETEPERG |
| 2042 | CRACDL_2 | KEAEPTPPVLPDEEKGPPGPAPEPEREAETEPERGAG |
| | | TEPERIGTEPSTAPAPSPPAPKSCL |
| 2043 | CRACDL_3 | SKPPLPRKPLLQSFTLPHQPAPPDAGPGEREPRKEPR |
| | | TAEKRPLRRGAEKSLPPAATGPGAD |
| 2044 | FAM83G | DSRPRPEPCPPPEPSAPQDGVPAENGLPQGDPEPLPP |
| | | VPKPRTVPVADVLARDSSDIGWVLE |
| | MN1_0 | GPQRPGNLPDFHSSGASSHAVPAPCLPLDQSPNRAA |
| | | SFHGLPSSSGSDSHSLEPRRVTNQGA |
| | MN1_1 | RCASWNGSMHNGALDNHLSPSAYPGLPGEFTPPVP |
| | | DSFPSGPPLQHPAPDHQSLQQQQQQQQ |
| 2045 | DSG1 | DISLGKESYPDLDPSWPPQSTEPVCLPQETEPVVSGH |
| | | PPISPHFGTTTVISESTYPSGPGVL |
| | FARP2_0 | PSAQPLGPPALQPGPGLSTKSPQPSPSSRKSPLSLSPA |
| | | FQVPLGPAEQGSSPLLSPVLSDAG |
| | FARP2_1 | LGPPALQPGPGLSTKSPQPSPSSRKSPLSLSPAFQVPL |
| | | GPAEQGSSPLLSPVLSDAGGAGMD |
| | ZNF787 | EDQQMASHENPVDILIMDDDDVPSWPPTKLSPPQSA |
| | | PPAGPPPRPRPPAPYICNECGKSFSH |
| 2046 | PSMF1 | VGGEDLDPFGPRRGGMIVDPLRSGFPRALIDPSSGLP |
| | | NRLPPGAVPPGARFDPFGPIGTSPP |
| | ENKD1 | EPGPASGTESAHFLRAHSRCGPGLPPPHVSSPQPTPP |
| | | GPEAKEPGLGVDFIRHNARAAKRAP |
| | DAXX_0 | TANSIIVLDDDDEDEAAAQPGPSHPLPNAASPGAEA |
| | | PSSSEPHGARGSSSSGGKKCYKLENE |
| 2047 | DAXX_1 | DDEDEAAAQPGPSHPLPNAASPGAEAPSSSEPHGAR |
| | | GSSSSGGKKCYKLENEKLFEEFLELC |
| | HIVEP1_0 | YNIAVTSSVGLTSPSSRSQVTPQNQQMDSASPLSISP |
| | | ANSTQSPPMPIYNSTHVASVVNQSV |
| | HIVEP1_1 | TSSVGLTSPSSRSQVTPQNQQMDSASPLSISPANSTQ |
| | | SPPMPIYNSTHVASVVNQSVEQMCN |
| | HIVEP1_2 | EVSDLRSKSFDCGSITPPQTTPLTELQPPSSPSRVGVT |
| | | GHVPLLERRRGPLVRQISLNIAPD |
| | SETBP1 | RQRGGESDFLPVSSAKPPAAPGCAGEPLLSTPGPGK |
| | | GIPVGGERMEPEEEDELGSGRDVDSN |
| | SRRM2_0 | ATRPSPSPERSSTGPEPPAPTPLLAERHGGSPQPLATT |
| | | PLSQEPVNPPSEASPTRDRSPPKS |
| 2048 | SRRM2_1 | TGPEPPAPTPLLAERHGGSPQPLATTPLSQEPVNPPS |
| | | EASPTRDRSPPKSPEKLPQSSSSES |
| 2049 | PARD3B | LAAFKPIGGEIEVTPSALKLGTPLLVRRSSDPVPGPP |
| | | ADTQPSASHPGGQSLKLVVPDSTQN |
| | MAPK7 | RSLLERWTRMARPAAPALTSVPAPAPAPTPTPTPVQ |
| | | PTSPPPGPVAQPTGPQPQSAGSTSGP |
| 2050 | CPSF6 | PPAPHVNPAFFPPPTNSGMPTSDSRGPPPTDPYGRPP |
| | | PYDRGDYGPPGREMDTARTPLSEAE |
| | ALX3 | LQNSLWASPGSGSPGGPCLVSPEGIPSPCMSPYSHPH |
| | | GSVAGFMGVPAPSAAHPGIYSIHGF |
| | ATXN1L_0 | QLPSTSLQFIGSPYSLPYAVPPNFLPSPLLSPSANLAT |
| | | SHLPHFVPYASLLAEGATPPPQAP |
| | ATXN1L_1 | PSPLLSPSANLATSHLPHFVPYASLLAEGATPPPQAP |
| | | SPAHSFNKAPSATSPSGQLPHHSST |
| | ATXN1L_2 | PYASLLAEGATPPPQAPSPAHSFNKAPSATSPSGQLP |
| | | HHSSTQPLDLAPGRMPIYYQMSRLP |
| | ZZEF1_0 | IRPVDFKQRNKADKGVSLSKDPSCQTQISDSPADAS |
| | | PPTGLPDAEDSEVSSQKPIEEKAVTP |
| | ZZEF1_1 | FKQRNKADKGVSLSKDPSCQTQISDSPADASPPTGL |
| | | PDAEDSEVSSQKPIEEKAVTPSPEQV |
| 2051 | ZNF318_0 | SFDAYRHYMAYAASRWPMYPTSQPSNHPVPEPHRI |
| | | MPITKQATRSRPNLRVIPTVTPDKPKQ |
| | ZNF318_1 | DLKVEELTALGNLGDMPVDFCTTRVSPAHRSPTVL |
| | | CQKVCEENSVSPIGCNSSDPADFEPIP |
| 2052 | KATNB1 | PNLEVLPRPPVVASTPAPKAEPAIIPATRNEPIGLKAS |
| | | DFLPAVKIPQQAELVDEDAMSQIR |
| | PDLIM4 | DPEIQDGSPTTSRRPSGTGTGPEDGRPSLGSPYGQPP |
| | | RFPVPHNGSSEATLPAQMSTLHVSP |
| | CCDC9_0 | VAVTAPRKGRSVEKENVAVESEKNLGPSRRSPGTPR |
| | | PPGASKGGRTPPQQGGRAGMGRASRS |
| | CCDC9_1 | AAPRAYSDHDDRWETKEGAASPAPETPQPTSPETSP |
| | | KETPMQPPEIPAPAHRPPEDEGEENE |
| | CNNM4_0 | VEAGKENMKFETGAFSYYGTMALTSVPSDRSPAHP |
| | | TPLSRSASLSYPDRTDVSTAATLAGSS |
| | CNNM4_1 | ENMKFETGAFSYYGTMALTSVPSDRSPAHPTPLSRS |
| | | ASLSYPDRTDVSTAATLAGSSNQFGS |
| | CSF2RB | YVSSADLVFTPNSGASSVSLVPSLGLPSDQTPSLCPG |
| | | LASGPPGAPGPVKSGFEGYVELPPI |
| 2053 | FHOD1_0 | PETAPAARTPQSPAPCVLLRAQRSLAPEPKEPLIPASP |
| | | KAEPIWELPTRAPRLSIGDLDFSD |
| 2054 | FHOD1_1 | QSPAPCVLLRAQRSLAPEPKEPLIPASPKAEPIWELPT |
| | | RAPRLSIGDLDFSDLGEDEDQDML |
| 2055 | ZNF592_0 | DPHNCGKFDSTFMNGDSARSFPGKLEPPKSEPLPTF |
| | | NQFSPISSPEPEDPIKDNGFGIKPKH |
| 2056 | ZNF592_1 | MAVEVAEPEEGSGEEVPMETRENGLEECAGEPLSA |
| | | DPEARRLLGPAPEDDGGHNDHSQPQAS |
| | SPEG_0 | YMATATNELGQATCAASLTVRPGGSTSPFSSPITSDE |
| | | EYLSPPEEFPEPGETWPRTPTMKPS |
| | SPEG_1 | QATCAASLTVRPGGSTSPFSSPITSDEEYLSPPEEFPE |
| | | PGETWPRTPTMKPSPSQNRRSSDT |
| | SPEG_2 | ARRLQESPSLSALSEAQPSSPARPSAPKPSTPKSAEPS |
| | | ATTPSDAPQPPAPQPAQDKAPEPR |
| 2057 | SPEG_3 | ESPSLSALSEAQPSSPARPSAPKPSTPKSAEPSATTPS |
| | | DAPQPPAPQPAQDKAPEPRPEPVR |
| | SPEG_4 | SALSEAQPSSPARPSAPKPSTPKSAEPSATTPSDAPQP |
| | | PAPQPAQDKAPEPRPEPVRASKPA |
| 2028 | SPEG_5 | STPKSAEPSATTPSDAPQPPAPQPAQDKAPEPRPEPV |
| | | RASKPAPPPQALQTLALPLTPYAQI |
| | SPEG_6 | LSGHAQGPSQGPAAPPSEPKPHAAVFARVASPPPGA |
| | | PEKRVPSAGGPPVLAEKARVPTVPPR |
| | ARHGAP30 | PALQHRPSPASGPGPGPGLGPGPPDEKLEASPASSPL |
| | | ADSGPDDLAPALEDSLSQEVQDSFS |
| 2059 | TNFRSF8 | KFPGTAQKNTVCEPASPGVSPACASPENCKEPSSGTI |
| | | PQAKPTPVSPATSSASTMPVRGGTR |
| 2060 | ETL4 | NRDSVASSSHIAQEASPRPLLVPDEGPTALEPPTSIPS |
| | | ASRKGSSGAPQTSRMPVPMSAKNR |
| | TTBK2 | KIKLGICKAATEEENSHGQANGLLNAPSLGSPIRVRS |
| | | EITQPDRDIPLVRKLRSIHSFELEK |
| | POLR2A_0 | SAASDASGFSPGYSPAWSPTPGSPGSPGPSSPYIPSPG |
| | | GAMSPSYSPTSPAYEPRSPGGYTP |
| | POLR2A_1 | ASGFSPGYSPAWSPTPGSPGSPGPSSPYIPSPGGAMSP |
| | | SYSPTSPAYEPRSPGGYTPQSPSY |
| | POLR2A_2 | AWSPTPGSPGSPGPSSPYIPSPGGAMSPSYSPTSPAYE |
| | | PRSPGGYTPQSPSYSPTSPSYSPT |
| | KLF10 | SAGGVPPMPVICQMVPLPANNPVVTTVVPSTPPSQP |
| | | PAVCPPVVFMGTQVPKGAVMFVVPQP |
| 2061 | LIN37 | PPTPPGPPGDACRSRIPSPLQPEMQGTPDDEPSEPEPS |
| | | PSTLIYRNMQRWKRIRQRWKEASH |
| | ALDOC_0 | VTEKVLAAVYKALSDHHVYLEGTLLKPNMVTPGH |
| | | ACPIKYTPEEIAMATVTALRRTVPPAVP |
| | ALDOC_1 | KALSDHHVYLEGTLLKPNMVTPGHACPIKYTPEEIA |
| | | MATVTALRRTVPPAVPGVTFLSGGQS |
| | NEO1 | VKPPDLWIHHERLELKPIDKSPDPNPIMTDTPIPRNS |
| | | QDITPVDNSMDSNIHQRRNSYRGHE |
| 2062 | DAB2_0 | QSTKPGRGRRTAKSSANDLLASDIFAPPVSEPSGQAS |
| | | PTGQPTALQPNPLDLFKTSAPAPVG |
| | DAB2_1 | PGAMMGGQPSGFSQPVIFGTSPAVSGWNQPSPFAAS |
| | | TPPPVPVVWGPSASVAPNAWSTTSPL |
| | DAB2_2 | SPLGNPFQSNIFPAPAVSTQPPSMHSSLLVTPPQPPPR |
| | | AGPPKDISSDAFTALDPLGDKEIK |
| | GPATCH8_0 | KNSVTAKLLLEKIQSRKVERKPSVSEEVQATPNKAG |
| | | PKLKDPPQGYFGPKLPPSLGNKPVLP |
| 2063 | GPATCH8_1 | EKIQSRKVERKPSVSEEVQATPNKAGPKLKDPPQGY |
| | | FGPKLPPSLGNKPVLPLIGKLPATRK |
| 2064 | GPATCH8_2 | SSSQPGPVESSLLPIAPDLEHFPSYAPPSGDPSIESTDG |
| | | AEDASLAPLESQPITFTPEEMEK |
| | TMEM131_0 | HHAHSPLEQHPQPPLPPPVPQPQEPQPERLSPAPLAH |
| | | PSHPERASSARHSSEDSDITSLIEA |
| | TMEM131_1 | LPFTTPANTLASIGLMGTENSPAPHAPSTSSPADDLG |
| | | QTYNPWRIWSPTIGRRSSDPWSNSH |
| 2065 | DVL2 | NARLPCFNGRVVSWLVSSDNPQPEMAPPVHEPRAE |
| | | LAPPAPPLPPLPPERTSGIGDSRPPSF |
| | DIP2A | NPWSISSCDAFLNVFQSRGLRPEVICPCASSPEALTV |
| | | AIRRPPDLGGPPPRKAVLSMNGLSY |
| | MINK1_0 | ERTRMNKQQNSPLAKSKPGSTGPEPPIPQASPGPPGP |
| | | LSQTPPMQRPVEPQEGPHKSLVAHR |
| | MINK1_1 | SPLAKSKPGSTGPEPPIPQASPGPPGPLSQTPPMQRPV |
| | | EPQEGPHKSLVAHRVPLKPYAAPV |
| 2066 | PPP1R12C | SLQDLSKERRPGGAGGPPIQDEDEGEEGPTEPPPAEP |
| | | RTLNGVSSPPHPSPKSPVQLEEAPF |
| | IGSF9_0 | FSEIVLSAPEGLPTTPAAPGLPPTEIPPPLSPPRGLVAV |
| | | RTPRGVLLHWDPPELVPKRLDGY |
| | IGSF9_1 | GLPTTPAAPGLPPTEIPPPLSPPRGLVAVRTPRGVLLH |
| | | WDPPELVPKRLDGYVLEGRQGSQG |
| | IGSF9_2 | PDSVAKLKLQGSPVPSLRQSLLWGDPAGTPSPHPDP |
| | | PSSRGPLPLEPICRGPDGRFVMGPTV |
| 2067 | IGSF9_3 | SLRQSLLWGDPAGTPSPHPDPPSSRGPLPLEPICRGP |
| | | DGRFVMGPTVAAPQERSGREQAEPR |
| | IGSF9_4 | RTPAQRLARSFDCSSSSPSGAPQPLCIEDISPVAPPPA |
| | | APPSPLPGPGPLLQYLSLPFFREM |
| 2068 | IGSF9_5 | PLPGPGPLLQYLSLPFFREMNVDGDWPPLEEPSPAA |
| | | PPDYMDTRRCPTSSFLRSPETPPVSP |
| | MDC1 | PEAIAQGGQSKTLRSSTVRAMPVPTTPEFQSPVTTD |
| | | QPISPEPITQPSCIKRQRAAGNPGSL |
| 2069 | NCAPH2_0 | LYSRQGEVLASRKDFRMNTCVPHPRGAFMLEPEGM |
| | | SPMEPAGVSPMPGTQKDTGRTEEQPME |
| | NCAPH2_1 | GEVLASRKDFRMNTCVPHPRGAFMLEPEGMSPMEP |
| | | AGVSPMPGTQKDTGRTEEQPMEVSVCR |
| | ANKIB1 | PENCCQRSGVQMPTPPPSGYNAWDTLPSPRTPRTTR |
| | | SSVTSPDEISLSPGDLDTSLCDICMC |
| 2070 | UBN2_0 | AEYPGPEREPEYPREPPRLEPQPYREPARAEPPAPRE |
| | | PAPRSDAQPPSREKPLPQREVSRAE |
| | UBN2_1 | KSNPTPKPTVSPSSSSPNALVAQGSHSSTNSPVHKQP |
| | | SGMNISRQSPTLNLLPSSRTSGLPP |
| | UBN2_2 | SPNALVAQGSHSSTNSPVHKQPSGMNISRQSPTLNL |
| | | LPSSRTSGLPPTKNLQAPSKLTNSSS |
| 2071 | RASAL3_0 | RLSKALWGRHKNPPPEPDPEPEQEAPELEPEPELEPP |
| | | TPQIPEAPTPNVPVWDIGGFTLLDG |
| | RASAL3_1 | EPDPEPEQEAPELEPEPELEPPTPQIPEAPTPNVPVWD |
| | | IGGFTLLDGKLVLLGGEEEGPRRP |
| | TNRC6B_0 | KKKEATQKVTEQKTKVPEVTKPSLSQPTAASPIGSSP |
| | | SPPVNGGNNAKRVAVPNGQPPSAAR |
| | TNRC6B_1 | TQKVTEQKTKVPEVTKPSLSQPTAASPIGSSPSPPVN |
| | | GGNNAKRVAVPNGQPPSAARYMPRE |
| | TNRC6B_2 | GDPNSYNYKNVNLWDKNSQGGPAPREPNLPTPMTS |
| | | KSASVWSKSTPPAPDNGTSAWGEPNES |
| 2072 | MAP3K11 | LDSDDSSPLGSPSTPPALNGNPPRPSLEPEEPKRPVPA |
| | | ERGSSSGTPKLIQRALLRGTALLA |
| 2073 | XAGE2 | WRGRSTYRPRPRRSLQPPELIGAMLEPTDEEPKEEKP |
| | | PTKSRNPTPDQKREDDQGAAEIQVP |
| | CDAN1 | LQEEREMLRKERSKQLQQSPTPTCPTPELGSPLPSRT |
| | | GSLTDEPADPARVSSRQRLELVALV |
| | KLF13_0 | VARILADLNQQAPAPAPAERREGAAARKARTPCRL |
| | | PPPAPEPTSPGAEGAAAAPPSPAWSEP |
| 2074 | KLF13_1 | QAPAPAPAERREGAAARKARTPCRLPPPAPEPTSPG |
| | | AEGAAAAPPSPAWSEPEPEAGLEPER |
| | STK11IP | ELMSSFRERFGRNWLQYRSHLEPSGNPLPATPTTSA |
| | | PSAPPASSQGPDTAPRPSPPQEEARG |
| 2075 | SLC12A7_0 | FTVVPVEAHADGGGDETAERTEAPGTPEGPEPERPS |
| | | PGDGNPRENSPFLNNVEVEQESFFEG |
| | SLC12A7_1 | VEAHADGGGDETAERTEAPGTPEGPEPERPSPGDGN |
| | | PRENSPFLNNVEVEQESFFEGKNMAL |
| | SLC12A7_2 | ETAERTEAPGTPEGPEPERPSPGDGNPRENSPFLNNV |
| | | EVEQESFFEGKNMALFEEEMDSNPM |
| | DENND5A | GSLERILVGELLTSQPEVDERPCRTPPLQQSPSVIRRL |
| | | VTISPNNKPKLNTGQIQESIGEAV |
| | HIP1 | LQYFKRLIQIPQLPENPPNFLRASALSEHISPVVVIPA |
| | | EASSPDSEPVLEKDDLMDMDASQQ |
| | RBM15B_0 | YDRPLKVEPVYLRGGGGSSRRSSSSSAAASTPPPGPP |
| | | APADPLGYLPLHGGYQYKQRSLSPV |
| 2076 | RBM15B_1 | YLRGGGGSSRRSSSSSAAASTPPPGPPAPADPLGYLP |
| | | LHGGYQYKQRSLSPVAAPPLREPRA |
| | DENND4B_0 | LSGRGPKAGGRQDEAGTPRRGLGARLQQLLTPSRH |
| | | SPASRIPPPELPPDLPPPARRSPMDSL |
| | DENND4B_1 | PKAGGRQDEAGTPRRGLGARLQQLLTPSRHSPASRI |
| | | PPPELPPDLPPPARRSPMDSLLHPRE |
| | DENND4B_2 | QQLLTPSRHSPASRIPPPELPPDLPPPARRSPMDSLLH |
| | | PRERPGSTASESSASLGSEWDLSE |
| 2077 | MAP3K10_0 | EEFAEAEDGGSSVPPSPYSTPSYLSVPLPAEPSPGAR |
| | | APWEPTPSAPPARWGHGARRRCDLA |
| | MAP3K10_1 | FAEAEDGGSSVPPSPYSTPSYLSVPLPAEPSPGARAP |
| | | WEPTPSAPPARWGHGARRRCDLALL |
| 2078 | MAP3K10_2 | SSVPPSPYSTPSYLSVPLPAEPSPGARAPWEPTPSAPP |
| | | ARWGHGARRRCDLALLGCATLLGA |
| | MAP3K10_3 | VPPSPYSTPSYLSVPLPAEPSPGARAPWEPTPSAPPA |
| | | RWGHGARRRCDLALLGCATLLGAVG |
| 2079 | MAP3K10_4 | SDGALGQRGPPEPAGHGPGPRDLLDFPRLPDPQALF |
| | | PARRRPPEFPGRPTTLTFAPRPRPAA |
| | PAIP1_0 | AGPAERARHQPPQPKAPGFLQPPPLRQPRTTPPPGA |
| | | QCEVPASPQRPSRPGALPEQTRPLRA |
| | PAIP1_1 | QPKAPGFLQPPPLRQPRTTPPPGAQCEVPASPQRPSR |
| | | PGALPEQTRPLRAPPSSQDKIPQQN |
| 2080 | ASAP3 | SSLSSEAPETPESLGSPASSSSLMSPLEPGDPSQAPPN |
| | | SEEGLREPPGTSRPSLTSGTTPSE |
| 2081 | MINDY4 | LTVERQKTTASSPPHLPSKRLPPWDRARPRDPSEDTP |
| | | AVDGSTDTDRMPLKLYLPGGNSRMT |
| 2082 | RAVER1 | RLPPEPGLSDSYSFDYPSDMGPRRLFSHPREPALGPH |
| | | GPSRHKMSPPPSGFGERSSGGSGGG |
| 2083 | CASKIN2_0 | VSGPSPEPPPLDESPGPKEGATGPRRRTLSEPAGPSEP |
| | | PGPPAPAGPASDTEEEEPGPEGTP |
| | CASKIN2_1 | TESDTVKRRPKCREREPLQTALLAFGVASATPGPAA |
| | | PLPSPTPGESPPASSLPQPEPSSLPA |
| | CASKIN2_2 | EPLQTALLAFGVASATPGPAAPLPSPTPGESPPASSLP |
| | | QPEPSSLPAQGVPTPLAPSPAMQP |
| | CASKIN2_3 | PLPSPTPGESPPASSLPQPEPSSLPAQGVPTPLAPSPA |
| | | MQPPVPPCPGPGLESSAASRWNGE |
| | CASKIN2_4 | TPGESPPASSLPQPEPSSLPAQGVPTPLAPSPAMQPPV |
| | | PPCPGPGLESSAASRWNGETEPPA |
| | TFAP2E | RPDGLGAAAGGARLSSLPQAAYGPAPPLCHTPAAT |
| | | AAAEFQPPYFPPPYPQPPLPYGQAPDA |
| | CD5 | SRNDMCHSLGLTCLEPQKTTPPTTRPPPTTTPEPTAP |
| | | PRLQLVAQSGGQHCAGVVEFYSGSL |
| | DNAJB1 | DGRTIPVVFKDVIRPGMRRKVPGEGLPLPKTPEKRG |
| | | DLIIEFEVIFPERIPQTSRTVLEQVL |
| | PALMD | DEEEEDEGEAEKPSYHPIAPHSQVYQPAKPTPLPRK |
| | | RSEASPHENTNHKSPHKNSISLKEQE |
| | RNF10 | ALGPTSTEGHGALSISPLSRSPGSHADFLLTPLSPTAS |
| | | QGSPSFCVGSLEEDSPFPSFAQML |
| | KMT2C_0 | PIQDSLSQAQTSQPPSPQVFSPGSSNSRPPSPMDPYA |
| | | KMVGTPRPPPVGHSFSRRNSAAPVE |
| 2084 | KMT2C_1 | SYARPLLTPAPLDSGPGPFKTPMQPPPSSQDPYGSVS |
| | | QASRRLSVDPYERPALTPRPIDNFS |
| 2085 | KMT2C_2 | LTPHPAVNESFAHPSRAFSQPGTISRPTSQDPYSQPP |
| | | GTPRPVVDSYSQSSGTARSNTDPYS |
| 2086 | KMT2C_3 | VDSYSQSSGTARSNTDPYSQPPGTPRPTTVDPYSQQ |
| | | PQTPRPSTQTDLFVTPVTNQRHSDPY |
| 2087 | KMT2C_4 | VDPYSQQPQTPRPSTQTDLFVTPVTNQRHSDPYAHP |
| | | PGTPRPGISVPYSQPPATPRPRISEG |
| 2088 | KMT2C_5 | APPGSVVEASSNLRHGNFIPRPDFPGPRHTDPMRRPP |
| | | QGLPNQLPVHPDLEQVPPSQQEQGH |
| | KMT2C_6 | RETPSKAFHQYSNNISTLDVHCLPQLPEKASPPASPPI |
| | | AFPPAFEAAQVEAKPDELKVTVKL |
| | SH2D3A | RTPSFELPDASERPPTYCELVPRVPSVQGTSPSQSCPE |
| | | PEAPWWEAEEDEEEENRCFTRPQA |
| | PRPF6 | HTSVDPRQTQFGGLNTPYPGGLNTPYPGGMTPGLM |
| | | TPGTGELDMRKIGQARNTLMDMRLSQV |
| | CDK13_0 | LQLRPPPEPSTPVSGQDDLIQHQDMRILELTPEPDRP |
| | | RILPPDQRPPEPPEPPPVTEEDLDY |
| 2089 | CDK13_1 | QHQDMRILELTPEPDRPRILPPDQRPPEPPEPPPVTEE |
| | | DLDYRTENQHVPTTSSSLTDPHAG |
| | ARHGAP17 | KPNSQGPPNPMALPSEHGLEQPSHTPPQTPTPPSTPP |
| | | LGKQNPSLPAPQTLAGGNPETAQPH |
| | HIVEP2_0 | SAQLFGSGKLASPSEVVQQVAEKQYPPHRPSPYSCQ |
| | | HSLSFPQHSLPQGVMHSTKPHQSLEG |
| | HIVEP2_1 | SESAELVACTQDKAPSPSETCDSEISEAPVSPEWAPP |
| | | GDGAESGGKPSPSQQVQQQSYHTQP |
| | MAPIS | PTSEAGLSLPLRGPRARRSASPHDVDLCLVSPCEFEH |
| | | RKAVPMAPAPASPGSSNDSSARSQE |
| | ZBTB4_0 | SSSSSSSSSSSSSSSASSSSSSSSSSPPPASPPASSPPRVL |
| | | ELPGVPAAAFSDVLNFIYSAR |
| | ZBTB4_1 | SSSSSSSSSSASSSSSSSSSSPPPASPPASSPPRVLELPG |
| | | VPAAAFSDVLNFIYSARLALPG |
| | ZBTB4_2 | NTLKLYRLLPMRAAKRPYKTYSQGAPEAPLSPTLNT |
| | | PAPVAMPASPPPGPPPAPEPGPPPSV |
| | ZBTB4_3 | YRLLPMRAAKRPYKTYSQGAPEAPLSPTLNTPAPVA |
| | | MPASPPPGPPPAPEPGPPPSVITFAH |
| 2090 | EVX1 | VPPATRERGGGGPEEEPVDGLAGSAAGPGAEPQVA |
| | | GAAMLGPGPPAPSVDSLSGQGQPSSSD |
| | NFATC3_0 | HLPQLQCRDESVSKEQHMIPSPIVHQPFQVTPTPPVG |
| | | SSYQPMQTNVVYNGPTCLPINAASS |
| | NFATC3_1 | PVADQITGQPSSQLQPITYGPSHSGSATTASPAASHP |
| | | LASSPLSGPPSPQLQPMPYQSPSSG |
| | NFATC3_2 | SSQLQPITYGPSHSGSATTASPAASHPLASSPLSGPPS |
| | | PQLQPMPYQSPSSGTASSPSPATR |
| 2091 | RRP1B | RRKKKKKHHLQPENPGPGGAAPSLEQNRGREPEAS |
| | | GLKALKARVAEPGAEATSSTGEESGSE |
| | ZBTB32 | WLRENPGGSEESLRKLPGPLPPAGSLQTSVTPRPSW |
| | | AEAPWLVGGQPALWSILLMPPRYGIP |
| | DPH2 | VVLLSEPACAHALEALATLLRPRYLDLLVSSPAFPQ |
| | | PVGSLSPEPMPLERFGRRFPLAPGRR |
| 2092 | SAPCD2 | GVRAPLAGPSAAARSPEQLCAPAEAAPCPAEPERSQ |
| | | SAALEPSSSADAGAVACRALEADSGD |
| | DMRTC2_0 | KGTTQPQVPSGKENIAPQPQTPHGAVLLAPTPPGKN |
| | | SCGPLLLSHPPEASPLSWTPVPPGPW |
| | DMRTC2_1 | QTPHGAVLLAPTPPGKNSCGPLLLSHPPEASPLSWTP |
| | | VPPGPWVPGHWLPPGFSMPPPVVCR |
| | DMRTC2_2 | AVLLAPTPPGKNSCGPLLLSHPPEASPLSWTPVPPGP |
| | | WVPGHWLPPGFSMPPPVVCRLLYQE |
| | RBM25 | APSVSSASGNATPNTPGDESPCGIIIPHENSPDQQQPE |
| | | EHRPKIGLSLKLGASNSPGQPNSV |
| | AATK_0 | SGGDHPQAEPKLATEAEGTTGPRLPLPSVPSPSQEG |
| | | APLPSEEASAPDAPDALPDSPTPATG |
| 2093 | AATK_1 | PGEVLPPLLQLEGSSPEPSTCPSGLVPEPPEPQGPAKV |
| | | RPGPSPSCSQFFLLTPVPLRSEGN |
| 2094 | WDR6 | GREITCVKRVGTITLGPEYGVPSFMQPDDLEPGSEGP |
| | | DLTDIVITCSEDTTVCVLALPTTTG |
| | GATA5 | QGALLPREQFAAPLGRPVGTSYSATYPAYVSPDVA |
| | | QSWTAGPFDGSVLHGLPGRRPTFVSDF |
| | CC2D1A | ASIRKGNAIDEADIPPPVAIGKGPASTPTYSPAPTQPA |
| | | PRIASAPEPRVTLEGPSATAPASS |
| | NACAD | HGPRSALGGAREVPDAPPAACPEVSQARLLSPAREE |
| | | RGLSGKSTPEPTLPSAVATEASLDSC |
| | CUX2 | VSLNSPSAASSPGLMMSVSPVPSSSAPISPSPPGAPPA |
| | | KVPSASPTADMAGALHPSAKVNPN |
| | BSN_0 | LGASLLTQASTLMSVQPEADTQGQPAPSKGTPKIVF |
| | | NDASKEAGPKPLGSGPGPGPAPGAKT |
| 2095 | BSN_1 | PLPAKASPLSTKASPLPSKASPQAKPLRASEPSKTPSS |
| | | VQEKKTRVPTKAEPMPKPPPETTP |
| 2096 | BSN_2 | SPQAKPLRASEPSKTPSSVQEKKTRVPTKAEPMPKPP |
| | | PETTPTPATPKVKSGVRRAEPATPV |
| | BSN_3 | EPSKTPSSVQEKKTRVPTKAEPMPKPPPETTPTPATP |
| | | KVKSGVRRAEPATPVVKAVPEAPKG |
| | BSN_4 | PSSVQEKKTRVPTKAEPMPKPPPETTPTPATPKVKSG |
| | | VRRAEPATPVVKAVPEAPKGGEAED |
| | BSN_5 | SGGRVIPDVRVTQHFAKETQDPLKLHSSPASPSSASK |
| | | EIGMPFSQGPGTPATTAVAPCPAGL |
| | BSN_6 | GPRATAEFSTQTPSPAPASDMPRSPGAPTPSPMVAQ |
| | | GTQTPHRPSTPRLVWQESSQEAPFMV |
| | BSN_7 | QTRMVHASASTSPLCSPTETQPTTHGYSQTTPPSVSQ |
| | | LPPEPPGPPGFPRVPSAGADGPLAL |
| 2097 | BSN_8 | TAATDPKVEIVRYISAPEKTGRGESLACQTEPDGQA |
| | | QGVAGPQLVGPTAISPYLPGIQIVTP |
| | BSN_9 | GRGESLACQTEPDGQAQGVAGPQLVGPTAISPYLPG |
| | | IQIVTPGPLGRFEKKKPDPLEIGYQA |
| 2098 | CHERP | AIPPTTQPDDSKPPIQMPGSSEYEAPGGVQDPAAAGP |
| | | RGPGPHDQIPPNKPPWFDQPHPVAP |
| | PPRC1_0 | GPLDLYPKLADTIQTNPIPTHLSLVDSAQASPMPVDS |
| | | VEADPTAVGPVLAGPVPVDPGLVDL |
| 2099 | PPRC1_1 | DTIQTNPIPTHLSLVDSAQASPMPVDSVEADPTAVGP |
| | | VLAGPVPVDPGLVDLASTSSELVEP |
| 2100 | PPRC1_2 | DSAQASPMPVDSVEADPTAVGPVLAGPVPVDPGLV |
| | | DLASTSSELVEPLPAEPVLINPVLADS |
| 2101 | PPRC1_3 | DPTAVGPVLAGPVPVDPGLVDLASTSSELVEPLPAE |
| | | PVLINPVLADSAAVDPAVVPISDNLP |
| 2102 | PPRC1_4 | GPVLAGPVPVDPGLVDLASTSSELVEPLPAEPVLINP |
| | | VLADSAAVDPAVVPISDNLPPVDAV |
| 2103 | PPRC1_5 | DLASTSSELVEPLPAEPVLINPVLADSAAVDPAVVPI |
| | | SDNLPPVDAVPSGPAPVDLALVDPV |
| | PPRC1_6 | ISDNLPPVDAVPSGPAPVDLALVDPVPNDLTPVDPV |
| | | LVKSRPTDPRRGAVSSALGGSAPQLL |
| | PPRC1_7 | PSLPETPTGLADIPCLVIPPAPAKKTALQRSPETPLEIC |
| | | LVPVGPSPASPSPEPPVSKPVAS |
| | PPRC1_8 | PETPTGLADIPCLVIPPAPAKKTALQRSPETPLEICLV |
| | | PVGPSPASPSPEPPVSKPVASSPT |
| | PPRCI_9 | LVIPPAPAKKTALQRSPETPLEICLVPVGPSPASPSPE |
| | | PPVSKPVASSPTEQVPSQEMPLLA |
| | PPRC1_10 | PPAPAKKTALQRSPETPLEICLVPVGPSPASPSPEPPV |
| | | SKPVASSPTEQVPSQEMPLLARPS |
| 2104 | PPRC1_11 | AKKTALQRSPETPLEICLVPVGPSPASPSPEPPVSKPV |
| | | ASSPTEQVPSQEMPLLARPSPPVQ |
| | PPRC1_12 | ETPLEICLVPVGPSPASPSPEPPVSKPVASSPTEQVPS |
| | | QEMPLLARPSPPVQSVSPAVPTPP |
| | LMTK2 | DVMLTGDTLSTSLQSSPEVQVPPTSFETEETPRRVPP |
| | | DSLPTQGETQPTCLDVIVPEDCLHQ |
| | ARNT2 | QLNQSQVAWTGSRPPFPGQQIPSQSSKTQSSPFGIGT |
| | | SHTYPADPSSYSPLSSPATSSPSGN |
| | HHEX | YIEDILGRGPAAPTPAPTLPSPNSSFTSLVSPYRTPVY |
| | | EPTPIHPAFSHHSAAALAAAYGPG |
| | TMEM201 | PHPSVGGSPASLFIPSPPSFLPLANQQLFRSPRRTSPSS |
| | | LPGRLSRALSLGTIPSLTRADSG |
| | ALX4_0 | YGAGQQDLATPLESGAGARGSFNKFQPQPSTPQPQP |
| | | PPQPQPQQQQPQPQPPAQPHLYLQRG |
| | ALX4_1 | IQNPSWLGNNGAASPVPACVVPCDPVPACMSPHAH |
| | | PPGSGASSVTDFLSVSGAGSHVGQTHM |
| | MNT_0 | PLAPRQPALVGAPGLSIKEPAPLPSRPQVPTPAPLLP |
| | | DSKATIPPNGSPKPLQPLPTPVLTI |
| | MNT_1 | KEPAPLPSRPQVPTPAPLLPDSKATIPPNGSPKPLQPL |
| | | PTPVLTIAPHPGVQPQLAPQQPPP |
| | MNT_2 | TTHASVIQTVNHVLQGPGGKHIAHIAPSAPSPAVQL |
| | | APATPPIGHITVHPATLNHVAHLGSQ |
| | NFATC4_0 | ASATPFGTDMDFSPPRPPYPSYPHEDPACETPYLSEG |
| | | FGYGMPPLYPQTGPPPSYRPGLRMF |
| | NFATC4_1 | SDPYGGRGSSFSLGLPFSPPAPFRPPPLPASPPLEGPFP |
| | | SQSDVHPLPAEGYNKVGPGYGPG |
| | TRIM33 | DNLLSRYISGSHLPPQPTSTMNPSPGPSALSPGSSGLS |
| | | NSHTPVRPPSTSSTGSRGSCGSSG |
| | RBPMS | PNPSTPLPNTVPQFIAREPYELTVPALYPSSPEVWAP |
| | | YPLYPAELAPALPPPAFTYPASLHA |
| 2105 | FCHSD1_0 | WRGEFGGRVGVFPSLLVEELLGPPGPPELSDPEQML |
| | | PSPSPPSFSPPAPTSVLDGPPAPVLP |
| | FCHSD1_1 | GVFPSLLVEELLGPPGPPELSDPEQMLPSPSPPSFSPP |
| | | APTSVLDGPPAPVLPGDKALDFPG |
| | SKOR1 | SAPSAGGGPDGEQPTGPPSATSSGADGPANSPDGGS |
| | | PRPRRRLGPPPAGRPAFGDLAAEDLV |
| | SMG6 | QYPYTGYNPLQYPVGPTNGVYPGPYYPGYPTPSGQ |
| | | YVCSPLPTSTMSPEEVEQHMRNLQQQE |
| 2106 | HERPUD1_0 | RPRPVQNFPNDGPPPDVVNQDPNNNLQEGTDPETE |
| | | DPNHLPPDRDVLDGEQTSPSFMSTAWL |
| 2017 | HERPUD1_1 | QNFPNDGPPPDVVNQDPNNNLQEGTDPETEDPNHL |
| | | PPDRDVLDGEQTSPSFMSTAWLVFKTF |
| | EHBP1L1_0 | GKEAEGSLTEASLPEAQVASGAGAGAPRASSPEKAE |
| | | EDRRLPGSQAPPALVSSSQSLLEWCQ |
| | EHBP1L1_1 | AAAAEGQAPDPSPAPGPPTAADSQQPPGGSSPSEEPP |
| | | PSPGEEAGLQRFQDTSQYVCAELQA |
| | TAOK2_0 | QPKSLKVRAGQRPPGLPLPIPGALGPPNTGTPIEQQP |
| | | CSPGQEAVLDQRMLGEEEEAVGERR |
| 2108 | TAOK2_1 | ELGWVQGPALTPVPEEEEEEEEGAPIGTPRDPGDGC |
| | | PSPDIPPEPPPTHLRPCPASQLPGLL |
| 2109 | ASPSCR1_0 | KSGQDPQQEQEQERERDPQQEQERERPVDREPVDR |
| | | EPVVCHPDLEERLQAWPAELPDEFFEL |
| 2110 | ASPSCR1_1 | PQQEQEQERERDPQQEQERERPVDREPVDREPVVC |
| | | HPDLEERLQAWPAELPDEFFELTVDDV |
| | ARHGEF5_0 | RKGTVSSQGTEVVFASASVTPPRTPDSAPPSPAEAYP |
| | | ITPASVSARPPVAFPRRETSCAARA |
| | ARHGEF5_1 | GPLPQASDPAVARQHRPLPSTPDSSHHAQATPRWR |
| | | YNKPLPPTPDLPQPHLPPISAPGSSRI |
| | RBM27_0 | LGTPPPLLAARLVPPRNLMGSSIGYHTSVSSPTPLVP |
| | | DTYEPDGYNPEAPSITSSGRSQYRQ |
| 2111 | RBM27_1 | RLVPPRNLMGSSIGYHTSVSSPTPLVPDTYEPDGYNP |
| | | EAPSITSSGRSQYRQFFSRTQTQRP |
| | ANKRD34A_0 | GRGMLSPRAQEEEEKRDVFEFPLPKPPDDPSPSEPLP |
| | | KPPRHPPKPLKRLNSEPWGLVAPPQ |
| | ANKRD34A_1 | PGLLERRGSGTLLLDHISQTRPGFLPPLNVSPHPPIPD |
| | | IRPQPGGRAPSLPAPPYAGAPGSP |
| | ANKHD1 | PHFALLAAQTMQQIRHPRLPMAQFGGTFSPSPNTW |
| | | GPFPVRPVNPGNTNSSPKHNNTSRLPN |
| 2112 | ZNF444 | DSGMIPLAGTAPGAEGPAPGDSQAVRPYKQEPSSPP |
| | | LAPGLPAFLAAPGTTSCPECGKTSLK |
| | EPS8L2 | PVSRQSIRNSQKHSPTSEPTPPGDALPPVSSPHTHRG |
| | | YQPTPAMAKYVKILYDFTARNANEL |
| | HOXD1 | PVALQPAFPLGNGDGAFVSCLPLAAARPSPSPPAAP |
| | | ARPSVPPPAAPQYAQCTLEGAYEPGA |
| 2113 | OGFR_0 | DTEGRTGPKEGTPGSPSETPGPSPAGPAGDEPAESPS |
| | | ETPGPRPAGPAGDEPAESPSETPGP |
| 2114 | OGFR_1 | GPSPAGPAGDEPAESPSETPGPRPAGPAGDEPAESPS |
| | | ETPGPRPAGPAGDEPAESPSETPGP |
| 2115 | OGFR_2 | GPRPAGPAGDEPAESPSETPGPRPAGPAGDEPAESPS |
| | | ETPGPSPAGPTRDEPAESPSETPGP |
| 2116 | OGFR_3 | GPRPAGPAGDEPAESPSETPGPSPAGPTRDEPAESPS |
| | | ETPGPRPAGPAGDEPAESPSETPGP |
| 2117 | OGFR_4 | GPSPAGPTRDEPAESPSETPGPRPAGPAGDEPAESPS |
| | | ETPGPRPAGPAGDEPAESPSETPGP |
| 2118 | OGFR_5 | GPRPAGPAGDEPAESPSETPGPRPAGPAGDEPAESPS |
| | | ETPGPSPAGPTRDEPAKAGEAAELQ |
| | PPARGC1B_0 | QSRSCTELHKHLTSAQCCLQDRGLQPPCLQSPRLPA |
| | | KEDKEPGEDCPSPQPAPASPRDSLAL |
| 2119 | PPARGC1B_1 | HLTSAQCCLQDRGLQPPCLQSPRLPAKEDKEPGEDC |
| | | PSPQPAPASPRDSLALGRADPGAPVS |
| | HUWE1_0 | PAPRGSGTASDDEFENLRIKGPNAVQLVKTTPLKPSP |
| | | LPVIPDTIKEVIYDMLNALAAYHAP |
| | HUWE1_1 | SGTASDDEFENLRIKGPNAVQLVKTTPLKPSPLPVIP |
| | | DTIKEVIYDMLNALAAYHAPEEADK |
| | PTPN3 | VSQNRSPHQESLSENNPAQSYLTQKSSSSVSPSSNAP |
| | | GSCSPDGVDQQLLDDFHRVTKGGST |
| | SLC24A1 | VHHCVVVKPTPAMLTTPSPSLTTALLPEELSPSPSVL |
| | | PPSLPDLHPKGEYPPDLFSVEERRQ |
| | DOCK2 | IISLASMNSDCSTPSKPTSESFDLELASPKTPRVEQEE |
| | | PISPGSTLPEVKLRRSKKRTKRSS |
| | SHARPIN | VRGATVEGQNGSKSNSPPALGPEACPVSLPSPPEAST |
| | | LKGPPPEADLPRSPGNLTEREELAG |
| | KIF13B | TAVPAEEPPGPQQLVSPGRERPDLEAPAPGSPFRVRR |
| | | VRASELRSFSRMLAGDPGCSPGAEG |
| | UNK | GSCPRGPFCAFAHVEQPPLSDDLQPSSAVSSPTQPGP |
| | | VLYMPSAAGDSVPVSPSSPHAPDLS |
| | BRME1 | VETLGVPLQEATELGDPTQADSARPEQSSQSPVQAV |
| | | PGSGDSQPDDPPDRGTGLSASQRASQ |
| | BICRA_0 | NSVFGGAGAASAPTGTPSGQPLAVAPGLGSSPLVPA |
| | | PNVILHRTPTPIQPKPAGVLPPKLYQ |
| | BICRA_1 | TPSGQPLAVAPGLGSSPLVPAPNVILHRTPTPIQPKPA |
| | | GVLPPKLYQLTPKPFAPAGATLTI |
| | BICRA_2 | QPAPQAPPAVSTPLPLGLQQPQAQQPPQAPTPQAAA |
| | | PPQATTPQPSPGLASSPEKIVLGQPP |
| | BICRA_3 | LGLQQPQAQQPPQAPTPQAAAPPQATTPQPSPGLAS |
| | | SPEKIVLGQPPSATPTAILTQDSLQM |
| | BICRA_4 | PAPQIPAAAPLKGPGPSSSPSLPHQAPLGDSPHLPSPH |
| | | PTRPPSRPPSRPQSVSRPPSEPPL |
| | BICRA_5 | PAAAPLKGPGPSSSPSLPHQAPLGDSPHLPSPHPTRPP |
| | | SRPPSRPQSVSRPPSEPPLHPCPP |
| 2120 | GREB1L | KRHRGWYPGSPLPQPGLVVPVPTVRPLSRTEPLLSA |
| | | PVPQTPLTGILQPRPIPAGETVIVPE |
| 2121 | PITPNM1 | SMNNELLSPEFGPVRDPLADGVEGLGRGSPEPSALP |
| | | PQRIPSDMASPEPEGSQNSLQAAPAT |
| 2122 | NCOR1 | PHHRGSTAGEVYRSHLPTHLDPAMPFHRALDPAAA |
| | | AYLFQRQLSPTPGYPSQYQLYAMENTR |
| | MED13_0 | YTPQTHTSFGMPPSSAPPSNSGAGILPSPSTPRFPTPR |
| | | TPRTPRTPRGAGGPASAQGSVKYE |
| | MED13_1 | HTSFGMPPSSAPPSNSGAGILPSPSTPRFPTPRTPRTP |
| | | RTPRGAGGPASAQGSVKYENSDLY |
| | ACACB | ADVNLPAAQLQIAMGVPLHRLKDIRLLYGESPWGV |
| | | TPISFETPSNPPLARGHVIAARITSEN |
| | ERF_0 | AFRGPPLARLPHDPGVFRVYPRPRGGPEPLSPFPVSP |
| | | LAGPGSLLPPQLSPALPMTPTHLAY |
| | ERF_1 | PLARLPHDPGVFRVYPRPRGGPEPLSPFPVSPLAGPG |
| | | SLLPPQLSPALPMTPTHLAYTPSPT |
| | ERF_2 | YPRPRGGPEPLSPFPVSPLAGPGSLLPPQLSPALPMTP |
| | | THLAYTPSPTLSPMYPSGGGGPSG |
| | HIPK1 | QPLQIQSGVLTQGSCTPLMVATLHPQVATITPQYAV |
| | | PFTLSCAAGRPALVEQTAAVLQAWPG |
| 2123 | HIP1R | EGPPNFLRASALAEHIKPVVVIPEEAPEDEEPENLIEI |
| | | STGPPAGEPVVVADLFDQTFGPPN |
| 2124 | PRR12_0 | PMPLQLEAHLRSHGLEPAAPSPRLRPEESLDPPGAM |
| | | QELLGALEPLPPAPGDTGVGPPNSEG |
| | PRR12_1 | GSSAPPPKAPAPPPKPETPEKTTSEKPPEQTPETAMP |
| | | EPPAPEKPSLLRPVEKEKEKEKVTR |
| 2125 | INPP5D_0 | YGSLSSFPKPAPRKDQESPKMPRKEPPPCPEPGILSPS |
| | | IVLTKAQEADRGEGPGKQVPAPRL |
| | INPP5D_1 | SFPKPAPRKDQESPKMPRKEPPPCPEPGILSPSIVLTK |
| | | AQEADRGEGPGKQVPAPRLRSFTC |
| | INPP5D_2 | QGKPKTPVSSQAPVPAKRPIKPSRSEINQQTPPTPTPR |
| | | PPLPVKSPAVLHLQHSKGRDYRDN |
| | INPP5D_3 | TPVSSQAPVPAKRPIKPSRSEINQQTPPTPTPRPPLPV |
| | | KSPAVLHLQHSKGRDYRDNTELPH |
| | SRRT | NFLTDAKRPALPEIKPAQPPGPAQILPPGLTPGLPYP |
| | | HQTPQGLMPYGQPRPPILGYGAGAV |
| | HERC1_0 | TLLGVVKEGSTSAKVQWDEAEITISFPTFWSPSDTPL |
| | | YNLEPCEPLPFDVARFRGLTASVLL |
| 2126 | HERC1_1 | TSAKVQWDEAEITISFPTFWSPSDTPLYNLEPCEPLPF |
| | | DVARFRGLTASVLLDLTYLTGVHE |
| 2127 | ZNF335 | GPEEEDDDDIVDAGAIDDLEEDSDYNPAEDEPRGRQ |
| | | LRLQRPTPSTPRPRRRPGRPRKLPRL |
| | ARAP3_0 | PQAQPPKPVPKPRTVFGGLSGPATTQRPGLSPALGG |
| | | PGVSRSPEPSPRPPPLPTSSSEQSSA |
| | ARAP3_1 | LGAALEMFASENSPEPLSLIQPQDIVCLGVSPPPTDP |
| | | GDRFPFSFELILAGGRIQHFGTDGA |
| 2128 | ARAP3_2 | EMFASENSPEPLSLIQPQDIVCLGVSPPPTDPGDRFPF |
| | | SFELILAGGRIQHFGTDGADSLEA |
| 2129 | RAX | KAPEEGSEPSPPPAPAPAPEYEAPRPYCPKEPGEARP |
| | | SPGLPVGPATGEAKLSEEEQPKKKH |
| 2130 | RHOXF1 | ENGMNRDGGMIPEGGGGNQEPRQQPQPPPEEPAQA |
| | | AMEGPQPENMQPRTRRTKFTLLQVEEL |
| | PERM1_0 | PGPASSGDQMQRLLQGPAPRPPGEPPGSPKSPGHST |
| | | GSQRPPDSPGAPPRSPSRKKRRAVGA |
| 2131 | PERM1_1 | QDPAGVQWPDMCEFFFPDVGAQRSRRRGSPEPLPR |
| | | ADPVPAPIPGDPVPISIPEVYEHFFFG |
| | LNPK | PSAGAAVTARPGQEIRQRTAAQRNLSPTPASPNQGP |
| | | PPQVPVSPGPPKDSSAPGGPPERTVT |
| 2132 | SYDE1_0 | RLRGREKLPRKKSDAKERGHPAQRPEPSPPEPEPQA |
| | | PEGSQAGAEGPSSPEASRSPARGAYL |
| 2133 | SYDE1_1 | LGPGVPGTGEPAGEIWYNPIPEEDPRPPAPEPPGPQP |
| | | GSAESEGLAPQGAAPASPPTKASRT |
| | SYDE1_2 | GPAAGPGGTRSPRAGYLSDGDSPERPAGPPSPTSFRP |
| | | YEVGPAARAPPAALWGRLSLHLYGL |
| 2134 | ZNF462 | RARIIKHQKMYHKNNLKETTAPPPAPAPMPDPVVPP |
| | | VSLQDPCKELPAEVVERSILESMVKP |
| 2135 | CD248_0 | WTEMPGILWMEPTQPPDFALAYRPSFPEDREPQIPY |
| | | PEPTWPPPLSAPRVPYHSSVLSVTRP |
| | CD248_1 | PSQSPTNQTSPISPTHPHSKAPQIPREDGPSPKLALWL |
| | | PSPAPTAAPTALGEAGLAEHSQRD |
| | OFD1 | RSLESEMYLEGLGRSHIASPSPCPDRMPLPSPTESRH |
| | | SLSIPPVSSPPEQKVGLYRRQTELQ |
| 2136 | TPRN | SAPEPRAGPANRLAGSPPGSGQWKPKVESGDPSLHP |
| | | PPSPGTPSATPASPPASATPSQRQCV |
| | CDC27_0 | PLGTGTSILSKQVQNKPKTGRSLLGGPAALSPLTPSF |
| | | GILPLETPSPGDGSYLQNYTNTPPV |
| | CDC27_1 | TKSVFSQSGNSREVTPILAQTQSSGPQTSTTPQVLSP |
| | | TITSPPNALPRRSSRLFTSDSSTTK |
| | CDC27_2 | SQSGNSREVTPILAQTQSSGPQTSTTPQVLSPTITSPP |
| | | NALPRRSSRLFTSDSSTTKENSKK |
| | CDC27_3 | SREVTPILAQTQSSGPQTSTTPQVLSPTITSPPNALPR |
| | | RSSRLFTSDSSTTKENSKKLKMKF |
| | PODXL | STAPSSQETVQPTSPATALRTPTLPETMSSSPTAASTT |
| | | HRYPKTPSPTVAHESNWAKCEDLE |
| | PODXL2_0 | PTADYVFPDLTEKAGSIEDTSQAQELPNLPSPLPKM |
| | | NLVEPPWHMPPREEEEEEEEEEEREK |
| 2137 | PODXL2_1 | AGLSGQHEEVPALPSFPQTTAPSGAEHPDEDPLGSR |
| | | TSASSPLAPGDMELTPSSATLGQEDL |
| | TELO2_0 | RQRMDILDVLTLAAQELSRPGCLGRTPQPGSPSPNT |
| | | PCLPEAAVSQPGSAVASDWRVVVEER |
| | TELO2_1 | ILDVLTLAAQELSRPGCLGRTPQPGSPSPNTPCLPEA |
| | | AVSQPGSAVASDWRVVVEERIRSKT |
| | CNTROB | TKVPLAMASSLFRVPEPPSSHSQGSGPSSGSPERGGD |
| | | GLTFPRQLMEVSQLLRLYQARGWGA |
| | CIZ1_0 | QFAMPPATYDTAGLTMPTATLGNLRGYGMASPGL |
| | | AAPSLTPPQLATPNLQQFFPQATRQSLL |
| | CIZ1_1 | MPTATLGNLRGYGMASPGLAAPSLTPPQLATPNLQ |
| | | QFFPQATRQSLLGPPPVGVPMNPSQFN |
| 2138 | CIZ1_2 | DIAKEKRTPAPEPEPCEASELPAKRLRSSEEPTEKEPP |
| | | GQLQVKAQPQARMTVPKQTQTPDL |
| 2139 | CIZ1_3 | KRTPAPEPEPCEASELPAKRLRSSEEPTEKEPPGQLQ |
| | | VKAQPQARMTVPKQTQTPDLLPEAL |
| | NUP98 | GSHELENHQIADSMEFGFLPNPVAVKPLTESPFKVH |
| | | LEKLSLRQRKPDEDMKLYQTPLELKL |
| 2140 | PPP1R35_0 | ELKSADGEEAAAVPGPPPEPQVPQLRAPVPEPGLDL |
| | | SLSPRPDSPQPRHGSPGRRKGRAERR |
| 2141 | PPP1R35_1 | LQVPEEQVLNAALREKLALLPPQARAPHPKEPPGPG |
| | | PDMTILCDPETLFYESPHLTLDGLPP |
| | MEF2D | NQSSLQFSNPSGSLVTPSLVTSSLTDPRLLSPQQPAL |
| | | QRNSVSPGLPQRPASAGAMLGGDLN |
| | HMX3 | FALSQVGDLAFPRFEIPAQRFALPAHYLERSPAWWY |
| | | PYTLTPAGGHLPRPEASEKALLRDSS |
| | FOXB1 | GDYSAYGVPLKPLCHAAGQTLPAIPVPIKPTPAAVP |
| | | ALPALPAPIPTLLSNSPPSLSPTSSQ |
| | USP43 | SPPRPQPGHCDGDGEGGFACAPGPVPAAPGSPGEER |
| | | PPGPQPQLQLPAGDGARPPGAQGLKN |
| | MLXIPL_0 | PMAPPTALLQEEPLFSPRFPFPTVPPAPGVSPLPAPAA |
| | | FPPTPQSVPSPAPTPFPIELLPLG |
| | MLXIPL_1 | VSSTLLRSPGSPQETVPEFPCTFLPPTPAPTPPRPPPGP |
| | | ATLAPSRPLLVPKAERLSPPAPS |
| | SLX4 | PGAHRPKGPAKTKGPRHQRKHHESITPPSRSPTKEA |
| | | PPGLNDDAQIPASQESVATSVDGSDS |
| 2142 | SCAP_0 | AAQVTEQSPLGEGALAPMPVPSGMLPPSHPDPAFSIF |
| | | PPDAPKLPENQTSPGESPERGGPAE |
| | SCAP_1 | MLPPSHPDPAFSIFPPDAPKLPENQTSPGESPERGGPA |
| | | EVVHDSPVPEVTWGPEDEELWRKL |
| | RPAP1_0 | LQDHRDVVMLDNLPDLPPALVPSPPKRARPSPGHCL |
| | | PEDEDPEERLRRHDQHITAVLTKIIE |
| 2143 | RPAP1_1 | SPARASLLASQALHRGELQRVPTLLLPMPTEPLLPTD |
| | | WPFLPLIRLYHRASDTPSGLSPTDT |
| | IQSEC2_0 | SYSHPHHPQSPLSPHSPIPPHPSYPPLPPPSPHTPHSPL |
| | | PPTSPHGPLHASGPPGTANPPSA |
| | IQSEC2_1 | HPHHPQSPLSPHSPIPPHPSYPPLPPPSPHTPHSPLPPT |
| | | SPHGPLHASGPPGTANPPSANPK |
| | IQSEC2_2 | SPHSPIPPHPSYPPLPPPSPHTPHSPLPPTSPHGPLHAS |
| | | GPPGTANPPSANPKAKPSRISTV |
| 2144 | MTF1 | GDAESVSDVPPSTGNSASLSLPLVLQPGLSEPPQPLL |
| | | PASAPSAPPPAPSLGPGSQQAAFGN |
| 2145 | MLXIP | PSLAHMDEQGCEHTSRTEDPFIQPTDFGPSEPPLSVP |
| | | QPFLPVFTMPLLSPSPAPPPISPVL |
| 2146 | SPINDOC | NKKPRGQRWKEPPGEEPVRKKRGRPMTKNLDPDPE |
| | | PPSPDSPTETFAAPAEVRHFTDGSFPA |
| | PDLIM7_0 | GTEFMQDPDEEHLKKSSQVPRTEAPAPASSTPQEPW |
| | | PGPTAPSPTSRPPWAVDPAFAERYAP |
| | PDLIM7_1 | LKKSSQVPRTEAPAPASSTPQEPWPGPTAPSPTSRPP |
| | | WAVDPAFAERYAPDKTSTVLTRHSQ |
| 2147 | PDLIM7_2 | EAPAPASSTPQEPWPGPTAPSPTSRPPWAVDPAFAE |
| | | RYAPDKTSTVLTRHSQPATPTPLQSR |
| 2148 | TCFL5 | AKPAVRVRLEDRFNSIPAEPPPAPRGPEPPEPGGALN |
| | | NLVTLIRHPSELMNVPLQQQNKCTA |
| | ZC3H12D | AALRGSFSRLAFSDDLGPLGPPLPVPACSLTPRLGGP |
| | | DWVSAGGRVPGPLSLPSPESQFSPG |
| | IRX5 | TAPSPGYNSHLQYGADPAAAAAAAFSSYVGSPYDH |
| | | TPGMAGSLGYHPYAAPLGSYPYGDPAY |
| | TACC2_0 | HRDASSIGSVGLGGFCTASESSASLDPCLVSPEVTEP |
| | | RKDPQGARGPEGSLLPSPPPSQERE |
| 2149 | TACC2_1 | SIGSVGLGGFCTASESSASLDPCLVSPEVTEPRKDPQ |
| | | GARGPEGSLLPSPPPSQEREHPSSS |
| 2150 | TACC2_2 | PQTGMRGTKPNQVVCVAAGGQPEGGLPVSPEPSLL |
| | | TPTEEAHPASSLASFPAAQIPIAVEEP |
| | TACC2_3 | RGTKPNQVVCVAAGGQPEGGLPVSPEPSLLTPTEEA |
| | | HPASSLASFPAAQIPIAVEEPGSSSR |
| | TACC2_4 | DNQQENPPPTKKIGKKPVAKMPLRRPKMKKTPEKL |
| | | DNTPASPPRSPAEPNDIPIAKGTYTFD |
| 2151 | PRDM10 | KRKAHILKNHPGAELPPSIRKLRPAGPGEPDPMLSTH |
| | | TQLTGTIATPPVCCPHCSKQYSSKT |
| 2152 | CACTIN | LYKLKQEQGVESEPLFPILKQEPQSPSRSLEPEDAAP |
| | | TPPGPSSEGGPAEAEVDGATPTEGD |
| | ANKLE2 | SPSDRQSWPSPAVKGRFKSQLPDLSGPHSYSPGRNS |
| | | VAGSNPAKPGLGSPGRYSPVHGSQLR |
| | RAPIGAP2 | AGEGEAMEEGDSGGSQPSTTSPFKQEVFVYSPSPSSE |
| | | SPSLGAAATPIIMSRSPTDAKSRNS |
| | SLC26A9_0 | ENAPPTDPNNNQTPANGTSVSYITFSPDSSSPAQSEP |
| | | PASAEAPGEPSDMLASVPPFVTFHT |
| 2153 | SLC26A9_1 | TDPNNNQTPANGTSVSYITFSPDSSSPAQSEPPASAE |
| | | APGEPSDMLASVPPFVTFHTLILDM |
| 2154 | GSE1 | MGRPPVPAEAEHRPESTTRPGPNRHEPGGRDPPQHF |
| | | GGPPPLISPKPQLHAAPTALWNPVSL |
| | MAP1A_0 | SQYGTPVFSAPGHALHPGEPALGEAEERCLSPDDST |
| | | VKMASPPPSGPPSATHTPFHQSPVEE |
| | MAP1A_1 | SSPQKGLEVERWLAESPVGLPPEEEDKLTRSPFEIISP |
| | | PASPPEMVGQRVPSAPGQESPIPD |
| | MAP1A_2 | HMKNEPTTPSWLADIPPWVPKDRPLPPAPLSPAPGP |
| | | PTPAPESHTPAPFSWGTAEYDSVVAA |
| | MAP1A_3 | TPSWLADIPPWVPKDRPLPPAPLSPAPGPPTPAPESH |
| | | TPAPFSWGTAEYDSVVAAVQEGAAE |
| 2155 | MAP1A_4 | SSPISPKSLQSDTPTFSYAALAGPTVPPRPEPGPSMEP |
| | | SLTPPAVPPRAPILSKGPSPPLNG |
| | MAP1A_5 | SDTPTFSYAALAGPTVPPRPEPGPSMEPSLTPPAVPP |
| | | RAPILSKGPSPPLNGNILSCSPDRR |
| | MAP1A_6 | RFSPSLEAAEQESGELDPGMEPAAHSLWDLTPLSPA |
| | | PPASLDLALAPAPSLPGDMGDGILPC |
| 2156 | DOCK4_0 | LLSDKHKHSRENSCLSPRERPCSAIYPTPVEPSQRML |
| | | FNHIGDGALPRSDPNLSAPEKAVNP |
| | DOCK4_1 | TQTASPARHTTSVSPSPAGRSPLKGSVQSFTPSPVEY |
| | | HSPGLISNSPVLSGSYSSGISSLSR |
| 2157 | DOCK4_2 | SKTPPPYSVYERTLRRPVPLPHSLSIPVTSEPPALPPK |
| | | PLAARSSHLENGARRTDPGPRPRP |
| | CEP350 | LDSTAHTAKQDTVELQNQKSSAPVHAPRSHSPVKR |
| | | KPDKITANEDPPVISKRRHYDTDEVRQ |
| | MAML2 | PFNIDLGQQSQRSTPRPSLPMEKIVIKSEYSPGLTQGP |
| | | SGSPQLRPPSAGPAFSMANSALST |
| | ATAD5 | FFNSYYIGKSPKKISSPKKVVTSPRKVPPPSPKSSGPK |
| | | RALPPKTLANYFKVSPKPKNNEEI |
| | SMAP2 | PVPEKKLEPVVFEKVKMPQKKEDPQLPRKSSPKSTA |
| | | PVMDLLGLDAPVACSIANSKTSNTLE |
| | PTPN23_0 | GPTQLIQPRAPGPHAMPVAPGPALYPAPAYTPELGL |
| | | VPRSSPQHGVVSSPYVGVGPAPPVAG |
| | PTPN23_1 | GPQAAPLTIRGPSSAGQSTPSPHLVPSPAPSPGPGPVP |
| | | PRPPAAEPPPCLRRGAAAADLLSS |
| | PTPN23_2 | QDLVLGGDVPISSIQATIAKLSIRPPGGLESPVASLPG |
| | | PAEPPGLPPASLPESTPIPSSSPP |
| 2158 | PTPN23_3 | ISSIQATIAKLSIRPPGGLESPVASLPGPAEPPGLPPAS |
| | | LPESTPIPSSSPPPLSSPLPEAP |
| | PTPN23_4 | LPGPAEPPGLPPASLPESTPIPSSSPPPLSSPLPEAPQPK |
| | | EEPPVPEAPSSGPPSSSLELLA |
| | CASC3_0 | HGDSPAPLPPQGMLVQPGMNLPHPGLHPHQTPAPLP |
| | | NPGLYPPPVSMSPGQPPPQQLLAPTY |
| | CASC3_1 | GMNLPHPGLHPHQTPAPLPNPGLYPPPVSMSPGQPP |
| | | PQQLLAPTYFSAPGVMNFGNPSYPYA |
| | GOLGA3 | KVQCAEVNRASTEGESPDGPGQGGLCQNGPTPPFPD |
| | | PPSSLDPTTSPVGPDASPGVAGFHDN |
| 2159 | INF2 | KEGAQRKWAALKEKLGPQDSDPTEANLESADPELC |
| | | IRLLQMPSVVNYSGLRKRLEGSDGGWM |
| | MISP_0 | RRLCDLERERWAVIQGQAVRKSSTVATLQGTPDHG |
| | | DPRTPGPPRSTPLEENVVDREQIDFLA |
| 2160 | MISP_1 | LERERWAVIQGQAVRKSSTVATLQGTPDHGDPRTP |
| | | GPPRSTPLEENVVDREQIDFLAARQQF |
| | MISP_2 | GQAVRKSSTVATLQGTPDHGDPRTPGPPRSTPLEEN |
| | | VVDREQIDFLAARQQFLSLEQANKGA |
| | PROSER2_0 | PPDPPAPETLLAPPPLPSTPDPPRRELRAPSPPVEHPR |
| | | LLRSVPTPLVMAQKISERMAGNEA |
| | PROSER2_1 | MAQKISERMAGNEALSPTSPFREGRPGEWRTPAAR |
| | | GPRSGDPGPGPSHPAQPKAPRFPSNII |
| 2161 | PROSER2_2 | GNEALSPTSPFREGRPGEWRTPAARGPRSGDPGPGP |
| | | SHPAQPKAPRFPSNIIVINGAAREPR |
| | DTL | EDLSKDSLGPTKSSKIEGAGTSISEPPSPISPYASESCG |
| | | TLPLPLRPCGEGSEMVGKENSSP |
| | TOX4_0 | YLKALAAYKDNQECQATVETVELDPAPPSQTPSPPP |
| | | MATVDPASPAPASIEPPALSPSIVVN |
| 2162 | TOX4_1 | NQECQATVETVELDPAPPSQTPSPPPMATVDPASPA |
| | | PASIEPPALSPSIVVNSTLSSYVANQ |
| 2163 | TOX4_2 | VELDPAPPSQTPSPPPMATVDPASPAPASIEPPALSPS |
| | | IVVNSTLSSYVANQASSGAGGQPN |
| | TOX4_3 | APPSQTPSPPPMATVDPASPAPASIEPPALSPSIVVNS |
| | | TLSSYVANQASSGAGGQPNITKLI |
| | TOX4_4 | IKSVPLPTLKMQTTLVPPTVESSPERPMNNSPEAHTV |
| | | EAPSPETICEMITDVVPEVESPSQM |
| | CASKIN1_0 | GPAPATAKVKPTPQLLPPTERPMSPRSLPQSPTHRGF |
| | | AYVLPQPVEGEVGPAAPGPAPPPVP |
| | CASKIN1_1 | PPPEGEARKPAKPPVSPKPVLTQPVPKLQGSPTPTSK |
| | | KVPLPGPGSPEVKRAHGTPPPVSPK |
| | CASKIN1_2 | PEGEARKPAKPPVSPKPVLTQPVPKLQGSPTPTSKK |
| | | VPLPGPGSPEVKRAHGTPPPVSPKPP |
| | CASKIN1_3 | VAGLPSGSAGPSPAPSPARQPPAALAKPPGTPPSLGA |
| | | SPAKPPSPGAPALHVPAKPPRAAAA |
| | SRGAP3 | RLRSDGAAIPRRRSGGDTHSPPRGLGPSIDTPPRAAA |
| | | CPSSPHKIPLTRGRIESPEKRRMAT |
| | CSTF2T | PPLMQTPIQGGIPAPGPIPAAVPGAGPGSLTPGGAMQ |
| | | PQLGMPGVGPVPLERGQVQMSDPRA |
| 2164 | EGR3 | NLFPMIPDYNLYHHPNDMGSIPEHKPFQGMDPIRVN |
| | | PPPITPLETIKAFKDKQIHPGFGSLP |
| | ADNP2 | TQPVGPINRPVGPGVLPVSPSVTPGVLQAVSPGVLS |
| | | VSRAVPSGVLPAGQMTPAGQMTPAGV |
| 2165 | ARHGAP23_0 | HALSFRDSPFGGLPTFNLAQSPASFPPEASEPPRVVR |
| | | PEPSTRALEPPAEDRGDEVVLRQKP |
| 2166 | ARHGAP23_1 | LMPCDTLARRRLARGRPDGEGAGRGGPRAPEPPGS |
| | | ASSSSQESLRPPAAALASRPSRMEALR |
| | PRR36_0 | PKPKGLQALRPPQVTPPRKDAAPALGPLSSSPLATPS |
| | | PSGTKARPVPPPDNAATPLPATLPP |
| | PRR36_1 | HSSSLTCQLATPLPLAPPSPSAPPSLQTLPSPPATPPSQ |
| | | VPPTQLIMSFPEAGVSSLATAAF |
| | PRR36_2 | ASVSPSVSSPLQSMPPTQANPALPSLPTLLSPLATPPL |
| | | SAMSPLQGPVSPATSLGNSAFPLA |
| | PRR36_3 | LQGPVSPATSLGNSAFPLAALPQPGLSALTTPPPQAS |
| | | PSPSPPSLQATPHTLATLPLQDSPL |
| | PRR36_4 | ETPPCPAPCPLQAPPSPLTTPPPETPSSIATPPPQAPPA |
| | | LASPPLQGLPSPPLSPLATPPPQ |
| | PRR36_5 | ETPSSIATPPPQAPPALASPPLQGLPSPPLSPLATPPPQ |
| | | APPALALPPLQAPPSPPASPPLS |
| | PRR36_6 | SIATPPPQAPPALASPPLQGLPSPPLSPLATPPPQAPPA |
| | | LALPPLQAPPSPPASPPLSPLAT |
| | PRR36_7 | PSPQAPNALAVHLLQAPFSPPPSPPVQAPFSPPASPPV |
| | | SPSATPPSQAPPSLAAPPLQVPPS |
| | PRR36_8 | LAVHLLQAPFSPPPSPPVQAPFSPPASPPVSPSATPPS |
| | | QAPPSLAAPPLQVPPSPPASPPMS |
| | PRR36_9 | PSATPPSQAPPSLAAPPLQVPPSPPASPPMSPSATPPP |
| | | QAPPPLAAPPLQVPPSPPASPPMS |
| | PRR36_10 | PSATPPPQAPPPLAAPPLQVPPSPPASPPMSPSATPPP |
| | | RVPPLLAAPPLQVPPSPPASLPMS |
| | PRR36_11 | PSATPPPRVPPLLAAPPLQVPPSPPASLPMSPLAKPPP |
| | | QAPPALATPPLQALPSPPASFPGQ |
| | PRR36_12 | PPLQVPPSPPASLPMSPLAKPPPQAPPALATPPLQALP |
| | | SPPASFPGQAPFSPSASLPMSPLA |
| | PRR36_13 | LATPPLQALPSPPASFPGQAPFSPSASLPMSPLATPPP |
| | | QAPPVLAAPLLQVPPSPPASPTLQ |
| | SOX18_0 | APGHGAAADTRGLAAGPAALAAPAAPASPPSPQRS |
| | | PPRSPEPGRYGLSPAGRGERQAADESR |
| | SOX18_1 | GGCYGAPLAEALRTAPPAAPLAGLYYGTLGTPGPY |
| | | PGPLSPPPEAPPLESAEPLGPAADLWA |
| | SOX18_2 | EALRTAPPAAPLAGLYYGTLGTPGPYPGPLSPPPEAP |
| | | PLESAEPLGPAADLWADVDLTEFDQ |
| | DDI2 | QKENADPRPPVQFPNLPRIDFSSIAVPGTSSPRQRQPP |
| | | GTQQSHSSPGEITSSPQGLDNPAL |
| 2167 | EEFSEC_0 | TLDLGFSCFSVPLPARLRSSLPEFQAAPEAEPEPGEPL |
| | | LQVTLVDCPGHASLIRTIIGGAQI |
| 2168 | EEFSEC_1 | FSCFSVPLPARLRSSLPEFQAAPEAEPEPGEPLLQVTL |
| | | VDCPGHASLIRTIIGGAQIIDLMM |
| 2169 | TRIM47_0 | RKNHTLSELLQLRQGSGPGSGPGPAPALAPEPSAPS |
| | | ALPSVPEPSAPCAPEPWPAGEEPVRC |
| 2170 | TRIM47_1 | RQGSGPGSGPGPAPALAPEPSAPSALPSVPEPSAPCA |
| | | PEPWPAGEEPVRCDACPEGAALPAA |
| | TRIM47_2 | CPEGAALPAALSCLSCLASFCPAHLGPHERSPALRG |
| | | HRLVPPLRRLEESLCPRHLRPLERYC |
| | SF3B2 | AHKVPPPWLIAMQRYGPPPSYPNLKIPGLNSPIPESC |
| | | SFGYHAGGWGKPPVDETGKPLYGDV |
| | TBC1D25 | LLSDWDLSTAFATASKPYLQLRVDIRPSEDSPLLED |
| | | WDIISPKDVIGSDVLLAEKRSSLTTA |
| 2171 | SMPD1 | APGAPVSRILFLTDLHWDHDYLEGTDPDCADPLCCR |
| | | RGSGLPPASRPGAGYWGEYSKCDLPL |
| | HCFC1_0 | SADGKPTTIITTTQASGAGTKPTILGISSVSPSTTKPG |
| | | TTTIIKTIPMSAIITQAGATGVTS |
| 2172 | HCFC1_1 | QTSATSTTMTVMATGAPCSAGPLLGPSMAREPGGR |
| | | SPAFVQLAPLSSKVRLSSPSIKDLPAG |
| | NEUROD6_0 | TPPGHGTLDNSKSMKPYNYCSAYESFYESTSPECAS |
| | | PQFEGPLSPPPINYNGIFSLKQEETL |
| | NEUROD6_1 | GTLDNSKSMKPYNYCSAYESFYESTSPECASPQFEG |
| | | PLSPPPINYNGIFSLKQEETLDYGKN |
| | PPP1R3D_0 | SRKLGPRSLSCLSDLDGGVALEPRACRPPGSPGRAPP |
| | | PTPAPSGCDPRLRPIILRRARSLPS |
| 2173 | PPP1R3D_1 | DGGVALEPRACRPPGSPGRAPPPTPAPSGCDPRLRPII |
| | | LRRARSLPSSPERRQKAAGAPGAA |
| 2174 | NAPRT_0 | GSPLMDMLQLAEEPVPQAGQELRVWPPGAQEPCTV |
| | | RPAQVEPLLRLCLQQGQLCEPLPSLAE |
| 2175 | NAPRT_1 | AEEPVPQAGQELRVWPPGAQEPCTVRPAQVEPLLR |
| | | LCLQQGQLCEPLPSLAESRALAQLSLS |
| 2176 | PPIL4 | DIIKKINETFVDKDFVPYQDIRINHTVILDDPFDDPPD |
| | | LLIPDRSPEPTREQLDSGRIGADE |
| 2177 | CACNA1I_0 | SSAAAPAAEPGVTTEQPGPRSPPSSPPGLEEPLDGAD |
| | | PHVPHPDLAPIAFFCLRQTTSPRNW |
| 2178 | CACNA1I_1 | ALGLYQALQSRRQALGPEAPAPAKPGPHAKEPRHY |
| | | HGKTKGQGDEGRHLGSRHCQTLHGPAS |
| | CACNA1I_2 | NFLCEMEEIPFNPVRSWLKHDSSQAPPSPFSPDASSP |
| | | LLPMPAEFFHPAVSASQKGPEKGTG |
| | CACNA1I_3 | MEEIPFNPVRSWLKHDSSQAPPSPFSPDASSPLLPMP |
| | | AEFFHPAVSASQKGPEKGTGTGTLP |
| 2179 | CACNA1I_4 | SSLAAPGRPHAAALAHGLARSPSWAADRSKDPPGR |
| | | APLPMGLGPLAPPPQPLPGELEPGDAA |
| | ZFPM1 | LLLGAPLAGPGVEARTPADRGPSPAPAPAASPQPGS |
| | | RGPRDGLGPEPQEPPPGPPPSPAAAP |
| | SETDIA_0 | PVPERVAGSPVTPLPEQEASPARPAGPTEESPPSAPL |
| | | RPPEPPAGPPAPAPRPDERPSSPIP |
| 2180 | SETD1A_1 | VTPLPEQEASPARPAGPTEESPPSAPLRPPEPPAGPPA |
| | | PAPRPDERPSSPIPLLPPPKKRRK |
| | KEL | SLNFNRTLRLLMSQYGHFPFFRAYLGPHPASPHTPVI |
| | | QIDQPEFDVPLKQDQEQKIYAQIFR |
| | CCDC102A_0 | ESPQLSKGSLLTILGSPSPERMGPADSLPPTPPSGTPS |
| | | PGPPPALPLPPAPALLADGDWESR |
| | CCDC102A_1 | GSLLTILGSPSPERMGPADSLPPTPPSGTPSPGPPPAL |
| | | PLPPAPALLADGDWESREELRLRE |
| | NIBAN2 | TEIRGLLAQGLRPESPPPAGPLLNGAPAGESPQPKAA |
| | | PEASSPPASPLQHLLPGKAVDLGPP |
| 2181 | FAM89B | CQDLSFCQDLSSSLHSDSSYPPDAGLSDDEEPPDASL |
| | | PPDPPPLTVPQTHNARDQWLQDAFH |
| 2182 | SETX | RMGIEVKGGIFLWDPQPSSPQHPGATPPTGEPGFPV |
| | | VHQDLSHIQQPAAVVAALSSHKPPVR |
| | TANC2_0 | EEEYLEQDVENVSIGLQTEARPSQGLPVIQSPPSSPPH |
| | | RDSAYISSSPLGSHQVFDFRSSSS |
| | TANC2_1 | SSSQLGSPDVSHLIRRPISVNPNEIKPHPPTPRPLLHSQ |
| | | SVGLRFSPSSNSISSTSNLTPTF |
| | EPOP_0 | ASAPPRPAPGLEPQRGPAASPPQEPSSRPPSPPAGLST |
| | | EPAGPGTAPRPFLPGQPAEVDGNP |
| 2183 | EPOP_1 | PGLEPQRGPAASPPQEPSSRPPSPPAGLSTEPAGPGT |
| | | APRPFLPGQPAEVDGNPPPAAPEAP |
| | EPOP_2 | PGTAPRPFLPGQPAEVDGNPPPAAPEAPAASPSTASP |
| | | APAAPGDLRQEHFDRLIRRSKLWCY |
| | EPOP_3 | RPFLPGQPAEVDGNPPPAAPEAPAASPSTASPAPAAP |
| | | GDLRQEHFDRLIRRSKLWCYAKGFA |
| | ICE1_0 | GSTEFVDHDHFFDEDLQAAIDFFKLPPPLLSPVPSPPP |
| | | MSSPHPGSLPSSFAPETYFGEYTD |
| | ICE1_1 | FFDEDLQAAIDFFKLPPPLLSPVPSPPPMSSPHPGSLP |
| | | SSFAPETYFGEYTDSSDNDSVQLR |
| | ICE1_2 | PLISSSSPSSPASPVGQVSPFRETPVPPAMSPWPEDPR |
| | | RASPPDPSPSPSAASASERVVPSP |
| 2184 | ICE1_3 | SSPSSPASPVGQVSPFRETPVPPAMSPWPEDPRRASP |
| | | PDPSPSPSAASASERVVPSPLQFCA |
| | ICE1_4 | PASPVGQVSPFRETPVPPAMSPWPEDPRRASPPDPSP |
| | | SPSAASASERVVPSPLQFCAATPKH |
| | ICE1_5 | GQVSPFRETPVPPAMSPWPEDPRRASPPDPSPSPSAA |
| | | SASERVVPSPLQFCAATPKHALPVP |
| | ZBED4 | TSCLIRHMWRAHRAIVLQENGGTGIPPLYSTPPTLLP |
| | | SLLPPEGELSSVSSSPVKPVRESPS |
| | CAMSAP1_0 | ELKDAKTVLHQKSSRPPVPISNATKRSFLGSPAAGTL |
| | | AELQPPVQLPAEGCHRHYLHPEEPE |
| 2185 | CAMSAP1_1 | QPLVRRKMTGSRDLNRTFTPIPCSEFPMGIDPTETGP |
| | | LSVETAGEVCGGPLALGGFDPFPQG |
| | TBC1D17 | ELPHNVQEILGLAPPAEPHSPSPTASPLPLSPTRAPPT |
| | | PPPSTDTAPQPDSSLEILPEEEDE |
| | SLC12A9 | LGFYDDAPPQDHFLTDPAFSEPADSTREGSSPALSTL |
| | | FPPPRAPGSPRALNPQDYVATVADA |
| | DLG3 | ISHNSSLGYLGAVESKVSYPAPPQVPPTRYSPIPRHM |
| | | LAEEDFTREPRKIILHKGSTGLGFN |
| 2186 | SCARF1_0 | GTQCQQPCLPGTFGESCEQQCPHCRHGEACEPDTG |
| | | HCQRCDPGWLGPRCEDPCPTGTFGEDC |
| 2187 | SCARF1_1 | GTFGESCEQQCPHCRHGEACEPDTGHCQRCDPGWL |
| | | GPRCEDPCPTGTFGEDCGSTCPTCVQG |
| 2188 | SCARF1_2 | CPHCRHGEACEPDTGHCQRCDPGWLGPRCEDPCPT |
| | | GTFGEDCGSTCPTCVQGSCDTVTGDCV |
| | SCARF1_3 | GAQSGPEGREAEESTGPEEAEAPESFPAAASPGDSA |
| | | TGHRRPPLGGRTVAEHVEAIEGSVQE |
| | PRRX2_0 | MLASRSASLLKSYSQEAAIEQPVAPRPTALSPDYLS |
| | | WTASSPYSTVPPYSPGSSGPATPGVN |
| | PRRX2_1 | KSYSQEAAIEQPVAPRPTALSPDYLSWTASSPYSTVP |
| | | PYSPGSSGPATPGVNMANSIASLRL |
| 2189 | SGPP1 | RFQRLCGVEAPPRRSADRREDEKAEAPLAGDPRLR |
| | | GRQPGAPGGPQPPGSDRNQCPAKPDGG |
| | DOK2 | EEAISAQKNAAPATPQPQPATIPASLPRPDSPYSRPH |
| | | DSLPPPSPTTPVPAPRPRGQEGEYA |
| | ATF7 | GCGMVVGTASTMVTARPEQSQILIQHPDAPSPAQPQ |
| | | VSPAQPTPSTGGRRRRTVDEDPDERR |
| | UBQLN4 | QTEAPGLVPSLGSFGISRTPAPSAGSNAGSTPEAPTSS |
| | | PATPATSSPTGASSAQQQLMQQMI |
| 2190 | TET1 | AADGPGISQLGEVAPLPTLSAPVMEPLINSEPSTGVT |
| | | EPLTPHQPNHQPSFLTSPQDLASSP |
| | TANK | ACLPPGDHNALYVNSFPLLDPSDAPFPSLDSPGKAIR |
| | | GPQQPIWKPFPNQDSDSVVLSGTDS |
| 2191 | PDE12_0 | FPVCPKLSLEFGDPASSLFRWYKEAKPGAAEPEVGV |
| | | PSSLSPSSPSSSWTETDVEERVYTPS |
| | PDE12_1 | FGDPASSLFRWYKEAKPGAAEPEVGVPSSLSPSSPSS |
| | | SWTETDVEERVYTPSNADIGLRLKL |
| | RABL6 | ASPLAANGQSPSPGSQSPVVPAGAVSTGSSSPGTPQP |
| | | APQLPLNAAPPSSVPPVPPSEALPP |
| 2192 | FBRSL1 | GFAWEPFRGLELPRRAFPAAAPAPGSAALLEPPERP |
| | | YRDREPHGYSPERLRGELERARAPHL |
| | WNK1_0 | AVAPSKLLTSTTSTCLPPTNLPLGTVALPVTPVVTPG |
| | | QVSTPVSTTTSGVKPGTAPSKPPLT |
| 2193 | WNK1_1 | EGPVASPPFMDLEQAVLPAVIPKKEKPELSEPSHLNG |
| | | PSSDPEAAFLSRDVDDGSGSPHSPH |
| 2194 | TRIM65 | LRRNVALSGVLEVVRAGPARDPGPDPGPGPDPAAR |
| | | CPRHGRPLELFCRTEGRCVCSVCTVRE |
| 2195 | SEC24B | NSYDALEGGSYPDMLSSSASSPAPDPAPEPDPASAP |
| | | APASAPAPVVPQPSKMAKPFGYGYPT |
| | MORC2 | RSQADLKKLPLEVTTRPSTEEPVRRPQRPRSPPLPAV |
| | | IRNAPSRPPSLPTPRPASQPRKAPV |
| | MED12_0 | GVSSHSSHVISAQSTSTLPTTPAPQPPTSSTPSTPFSDL |
| | | LMCPQHRPLVFGLSCILQTILLC |
| | MED12_1 | IDPSSSVLFEDMEKPDFSLFSPTMPCEGKGSPSPEKP |
| | | DVEKEVKPPPKEKIEGTLGVLYDQP |
| 2196 | MED12_2 | QQRLLLYHTHLRPRPRAYYLEPLPLPPEDEEPPAPTL |
| | | LEPEKKAPEPPKTDKPGAAPPSTEE |
| | CDT1 | EKALSQLALRSAAPSSPGSPRPALPATPPATPPAASP |
| | | SALKGVSQDLLERIRAKEAQKQLAQ |
| 2197 | HCN3 | LVQHDRDMARGVRGRAPSTGAQLSGKPVLWEPLV |
| | | HAPLQAAAVTSNVAIALTHQRGPLPLSP |
| | CIPC | LQSWTVQPSFEVISAQPQLLFLHPPVPSPVSPCHTGE |
| | | KKSDSRNYLPILNSYTKIAPHPGKR |
| | RBPMS2 | ARDPYDLMGAALIPASPEAWAPYPLYTTELTPAISH |
| | | AAFTYPTATAAAAALHAQVRWYPSSD |
| 2198 | EPN3_0 | PSTHCSADPWDIPGFRPNTEASGSSWGPSADPWSPIP |
| | | SGTVLSRSQPWDLTPMLSSSEPWGR |
| | EPN3_1 | ASGSSWGPSADPWSPIPSGTVLSRSQPWDLTPMLSS |
| | | SEPWGRTPVLPAGPPTTDPWALNSPH |
| | FRAT1 | LRCALGDRGRVRGRAAPYCVAELATGPSALSPLPPQ |
| | | ADLDGPPGAGKQGIPQPLSGPCRRGW |
| | RERE_0 | PQDNESDSDSSAQQQMLQAQPPALQAPTGVTPAPSS |
| | | APPGTPQLPTPGPTPSATAVPPQGSP |
| | RERE_1 | SAQQQMLQAQPPALQAPTGVTPAPSSAPPGTPQLPT |
| | | PGPTPSATAVPPQGSPTASQAPNQPQ |
| | RERE_2 | MLQAQPPALQAPTGVTPAPSSAPPGTPQLPTPGPTPS |
| | | ATAVPPQGSPTASQAPNQPQAPTAP |
| | RERE_3 | TPAPSSAPPGTPQLPTPGPTPSATAVPPQGSPTASQAP |
| | | NQPQAPTAPVPHTHIQQAPALHPQ |
| | RERE_4 | QSALQSQQPPREQPLPPAPLAMPHIKPPPTTPIPQLPA |
| | | PQAHKHPPHLSGPSPFSMNANLPP |
| 2199 | RERE_5 | EKEREREREREREAERAAKASSSAHEGRLSDPQLSG |
| | | PGHMRPSFEPPPTTIAAVPPYIGPDT |
| | RERE_6 | RFPYPPGTLPNPLLGQPPHEHEMLRHPVFGTPYPRD |
| | | LPGAIPPPMSAAHQLQAMHAQSAELQ |
| | ETV5 | YGEKCLYNYCAYDRKPPSGFKPLTPPTTPLSPTHQN |
| | | PLFPPPQATLPTSGHAPAAGPVQGVG |
| | SYNJ2 | ASEEALSAVAPRDLEASSEPEPTPGAAKPETPQAPPL |
| | | LPRRPPPRVPAIKKPTLRRTGKPLS |
| | NBR1_0 | TAQDLLSFELLDINIVQELERVPHNTPVDVTPCMSPL |
| | | PHDSPLIEKPGLGQIEEENEGAGFK |
| | NBR1_1 | LDINIVQELERVPHNTPVDVTPCMSPLPHDSPLIEKP |
| | | GLGQIEEENEGAGFKALPDSMVSVK |
| | NBR1_2 | QTLETVPLIPEVVELPPSLPRSSPCVHHHGSPGVDLP |
| | | VTIPEVSSVPDQIRGEPRGSSGLVN |
| 2200 | NCKAP5L_0 | VLRALEETDPLLLCSPATPWRPPGQGPGSPEPINGEL |
| | | CGPPQPEPSPWAPCLLLGPGNLGGL |
| 2201 | NCKAP5L_1 | CSPATPWRPPGQGPGSPEPINGELCGPPQPEPSPWAP |
| | | CLLLGPGNLGGLLHWERLLGGLGGE |
| | NCKAP5L_2 | TSHFTACGSLTRTLDSGIGTFPPPDHGSSGTPSKNLP |
| | | KTKPPRLDPPPGVPPARPPPLTKVP |
| 2202 | NCKAP5L_3 | DSGIGTFPPPDHGSSGTPSKNLPKTKPPRLDPPPGVPP |
| | | ARPPPLTKVPRRAHTLEREVPGIE |
| 2203 | KLHL42 | LREARMTGTPVLVALGDFLGGPLAPHPYQGEPPSM |
| | | LRYEEMTERWFPLANNLPPDLVNVRGY |
| 2204 | PPP1R10 | KKVLSPTAAKPSPFEGKTSTEPSTAKPSSPEPAPPSEA |
| | | MDADRPGTPVPPVEVPELMDTASL |
| | KIFIC_0 | PFKSNPQHRESWPGMGSGEAPTPLQPPEEVTPHPAT |
| | | PARRPPSPRRSHHPRRNSLDGGGRSR |
| | KIF1C_1 | PQHRESWPGMGSGEAPTPLQPPEEVTPHPATPARRP |
| | | PSPRRSHHPRRNSLDGGGRSRGAGSA |
| | PHLDB1 | AMSVGSSYENTSPAFSPLSSPASSGSCASHSPSGQEP |
| | | GPSVPPLVPARSSSYHLALQPPQSR |
| 2205 | MRPS23 | FSRTRDLVRAGVLKEKPLWFDVYDAFPPLREPVFQR |
| | | PRVRYGKAKAPIQDIWYHEDRIRAKF |
| | EIF3F | APASSSDPAAAAAATAAPGQTPASAQAPAQTPAPA |
| | | LPGPALPGPFPGGRVVRLHPVILASIV |
| | UBE20 | EEKMEAVPDVERKEDKPEGQSPVKAEWPSETPVLC |
| | | QQCGGKPGVTFTSAKGEVFSVLEFAPS |
| 2206 | CHD6 | LRQQADYSLEVPGFGANFSDKPKQRRPRCKEPGKL |
| | | DVSSLSGEERVPAIPKEPGLRGFLPEN |
| 2207 | CEP192 | SLDVLPVKGPQGSPLLSRAARPPLDQLASEEPWTVL |
| | | PEHLILVAPSPCDMAKTGRFQIVNNS |
| | YLPM1_0 | KQQQYKHQMLHHQRDGPPGLVPMELESPPESPPVP |
| | | PGSYMPPSQSYMPPPQPPPSYYPPTSS |
| | YLPM1_1 | PSQSYMPPPQPPPSYYPPTSSQPYLPPAQPSPSQSPPS |
| | | QSYLAPTPSYSSSSSSSQSYLSHS |
| | YLPM1_2 | GHKKGPVVAKDTPEPVKEEVTVPATSQVPESPSSEE |
| | | PPLPPPNEEVPPPLPPEEPQSEDPEE |
| 2208 | YLPM1_3 | PVVAKDTPEPVKEEVTVPATSQVPESPSSEEPPLPPP |
| | | NEEVPPPLPPEEPQSEDPEEDARLK |
| | YLPM1_4 | SAGPPPVLPPPSLSSTAPPPVMPLPPLSSATPPPGIPPP |
| | | GVPQGIPPQLTAAPVPPASSSQS |
| | CDC42BPB | EPSVTVPLRSMSDPDQDFDKEPDSDSTKHSTPSNSSN |
| | | PSGPPSPNSPHRSQLPLEGLEQPAC |
| 2209 | MSL3 | TNRSQEELSPSPPLLNPSTPQSTESQPTTGEPATPKRR |
| | | KAEPEALQSLRRSTRHSANCDRLS |
| | MAP3K6 | AALGVLGPEVEKEAVSPRSEELSNEGDSQQSPGQQS |
| | | PLPVEPEQGPAPLMVQLSLLRAETDR |
| 2210 | CCDC34 | NAKHKPRPAAKSYGYANGKLTGFYSGNSYPEPAFY |
| | | NPIPWKPIHMPPPKEAKDLSGRKSKRP |
| | PKN3_0 | RGQDFLRASQMNLGMAAWGRLVMNLLPPCSSPSTI |
| | | SPPKGCPRTPTTLREASDPATPSNFLP |
| | PKN3_1 | LRASQMNLGMAAWGRLVMNLLPPCSSPSTISPPKG |
| | | CPRTPTTLREASDPATPSNFLPKKTPL |
| | PKN3_2 | LPKKTPLGEEMTPPPKPPRLYLPQEPTSEETPRTKRP |
| | | HMEPRTRRGPSPPASPTRKPPRLQD |
| 2211 | NUAK2_0 | TAHRPGKSNLKLPKGILKKKVSASAEGVQEDPPELS |
| | | PIPASPGQAAPLLPKKGILKKPRQRE |
| | NUAK2_1 | GKSNLKLPKGILKKKVSASAEGVQEDPPELSPIPASP |
| | | GQAAPLLPKKGILKKPRQRESGYYS |
| | NUAK2_2 | KLPKGILKKKVSASAEGVQEDPPELSPIPASPGQAAP |
| | | LLPKKGILKKPRQRESGYYSSPEPS |
| | CEP104 | YEQLELHSLLDAELMRRPFDLPLQPLARSGSPCHQK |
| | | PMPSLPQLEERGTENQFAEPFLQEKP |
| 2212 | DLGAP5 | RSATQAAKQVPRTVSSTTARKPVTRAANENEPEGK |
| | | VPSKGRPAKNVETKPDKGISCKVDSEE |
| | MAST3_0 | SSEDEGVGPGPAGPKRPVFILGEPDPPPAATPVMPKP |
| | | SSLSADTAALSHARLRSNSIGARHS |
| | MAST3_1 | LPGSPTHSLSPSPTTPCRSPAPDVPADTTASPPSASPS |
| | | SSSPASPAAAGHTRPSSLHGLAAK |
| | MAST3_2 | THSLSPSPTTPCRSPAPDVPADTTASPPSASPSSSSPA |
| | | SPAAAGHTRPSSLHGLAAKLGPPR |
| | MAST3_3 | RPSSLHGLAAKLGPPRPKTGRRKSTSSIPPSPLACPPI |
| | | SAPPPRSPSPLPGHPPAPARSPRL |
| | MAST3_4 | PRPKTGRRKSTSSIPPSPLACPPISAPPPRSPSPLPGHP |
| | | PAPARSPRLRRGQSADKLGTGER |
| | WNK4_0 | HRSWTAFSTSSSSPGTPLSPGNPFSPGTPISPGPIFPITS |
| | | PPCHPSPSPFSPISSQVSSNPS |
| | WNK4_1 | TPLSPGNPFSPGTPISPGPIFPITSPPCHPSPSPFSPISSQ |
| | | VSSNPSPHPTSSPLPFSSSTP |
| | WNK4_2 | GNPFSPGTPISPGPIFPITSPPCHPSPSPFSPISSQVSSNP |
| | | SPHPTSSPLPFSSSTPEFPVP |
| | WNK4_3 | SPSPFSPISSQVSSNPSPHPTSSPLPFSSSTPEFPVPLSQ |
| | | CPWSSLPTTSPPTFSPTCSQVT |
| | WNK4_4 | SAFSLAVMTVAQSLLSPSPGLLSQSPPAPPSPLPSLPL |
| | | PPPVAPGGQESPSPHTAEVESEAS |
| 2213 | PRRT3 | MNGADPISPQRVRGAVEAPGTPKSLIPGPSDPGPAV |
| | | NRTESPMGALQPDEAEEWPGRPQSHP |
| | CTTNBP2NL | NTANPRGDTSHSPTPGKVSSPLSPLSPGIKSPTIPRAE |
| | | RGNPPPIPPKKPGLTPSPSATTPL |
| 2214 | EEF1G | KPQAERKEEKKAAAPAPEEEMDECEQALAAEPKAK |
| | | DPFAHLPKSTFVLDEFKRKYSNEDTLS |
| 2215 | RBM20 | SPHGFSGQSKPDLTAGPMWPPPHNQPYELYDPEEPT |
| | | SDRTPPSFGGRLNNSKQGFIGAGRRA |
| | TAF3_0 | KVKDKGREDKMKAPAPPLVLPPKELALPLFSPATAS |
| | | RVPAMLPSLLPVLPEKLFEEKEKVKE |
| | TAF3_1 | RVGAGQDKIVISKVVPAPEAKPAPSQNRPKTPPPAP |
| | | APAPGPMLVSPAPVPLPLLAQAAAGP |
| | TAF3_2 | PAPEAKPAPSQNRPKTPPPAPAPAPGPMLVSPAPVPL |
| | | PLLAQAAAGPALLPSPGPAASGASA |
| 2216 | DHX34 | VVQVPGRLFPITVVYQPQEAEPTTSKSEKLDPRPFLR |
| | | VLESIDHKYPPEERGDLLVFLSGMA |
| | C1orf116_0 | LIPPPEAFRDTQPEQCREASLPEGPGQQGHTPQLHTP |
| | | SSSQEREQTPSEAMSQKAKETVSTR |
| | C1orf116_1 | EAFRDTQPEQCREASLPEGPGQQGHTPQLHTPSSSQ |
| | | EREQTPSEAMSQKAKETVSTRYTQPQ |
| | PHACTR4_0 | ITTKTPSDEREKSTCSMGSELLPMISPRSPSPPLPTHIP |
| | | PEPPRTPPFPAKTFQVVPEIEFP |
| 2217 | PHACTR4_1 | EKSTCSMGSELLPMISPRSPSPPLPTHIPPEPPRTPPFP |
| | | AKTFQVVPEIEFPPSLDLHQEIP |
| 2218 | PGM2 | TSVHGVGHSFVQSAFKAFDLVPPEAVPEQKDPDPEF |
| | | PTVKYPNPEEGKGVLTLSFALADKTK |
| | PARP10 | TLEGLDLDGEDWLPRELEEEGPQEQPEEEVTPGHEE |
| | | EEPVAPSTVAPRWLEEEAALQLALHR |
| 2219 | PAXIP1 | SPEKQERNLNWTPAEVPQLAAAKRRLPQGKEPGLIN |
| | | LCANVPPVPGNILPPEVRGNLMAAGQ |
| | SH3RF3_0 | GSCPIESEMQGAMGMEPLHRKAGSLDLNFTSPSRQA |
| | | PLSMAAIRPEPKLLPRERYRVVVSYP |
| 2220 | SH3RF3_1 | EPLHRKAGSLDLNFTSPSRQAPLSMAAIRPEPKLLPR |
| | | ERYRVVVSYPPQSEAEIELKEGDIV |
| | MED1_0 | RKKADTEGKSPSHSSSNRPFTPPTSTGGSKSPGSAGR |
| | | SQTPPGVATPPIPKITIQIPKGTVM |
| | MED1_1 | SNRPFTPPTSTGGSKSPGSAGRSQTPPGVATPPIPKITI |
| | | QIPKGTVMVGKPSSHSQYTSSGS |
| | MED1_2 | GLSSGSSSTKMKPQGKPSSLMNPSLSKPNISPSHSRP |
| | | PGGSDKLASPMKPVPGTPPSSKAKS |
| | MED1_3 | KPSSLMNPSLSKPNISPSHSRPPGGSDKLASPMKPVP |
| | | GTPPSSKAKSPISSGSGGSHMSGTS |
| 2221 | ELL_0 | PGYSEGDQQLLKRVLVRKLCQPQSTGSLLGDPAASS |
| | | PPGERGRSASPPQKRLQPPDFIDPLA |
| | ELL_1 | GDQQLLKRVLVRKLCQPQSTGSLLGDPAASSPPGER |
| | | GRSASPPQKRLQPPDFIDPLANKKPR |
| | CASP9 | LEDTGQDMLASFLRTNRQAAKLSKPTLENLTPVVL |
| | | RPEIRKPEVLRPETPRPVDIGSGGFGD |
| 2222 | HOXD4 | LYPRPDFGEQPFGGSGPGPGSALPARGHGQEPGGPG |
| | | GHYAAPGEPCPAPPAPPPAPLPGARA |
| | PPFIA3 | SRVSSSGLDSLGRYRSSCSLPPSLTTSTLASPSPPSSG |
| | | HSTPRLAPPSPAREGTDKANHVPK |
| 2223 | PHF12_0 | RPGTPTSSASTETPTSEQNDVDEDIIDVDEEPVAAEP |
| | | DYVQPQLRRPFELLIAAAMERNPTQ |
| 2224 | PHF12_1 | TSSASTETPTSEQNDVDEDIIDVDEEPVAAEPDYVQP |
| | | QLRRPFELLIAAAMERNPTQFQLPN |
| | GAK_0 | DLLSCLLGPPEAASQGPPEDLLSEDPLLLASPAPPLS |
| | | VQSTPRGGPPAAADPFGPLLPSSGN |
| | GAK_1 | EAASQGPPEDLLSEDPLLLASPAPPLSVQSTPRGGPP |
| | | AAADPFGPLLPSSGNNSQPCSNPDL |
| | GAK_2 | APCGSQASWTKSQNPDPFADLGDLSSGLQGSPAGFP |
| | | PGGFIPKTATTPKGSSSWQTSRPPAQ |
| 2225 | HAUS6 | KEFLGLSPFSLIKGWTPSVDLLPPMSPLSFDPASEEV |
| | | YAKSILCQYPASLPDAHKQHNQENG |
| 2226 | BARHL1 | ELLAEAGNYSALQRMFPSPYFYPQSLVSNLDPGAAL |
| | | YLYRGPSAPPPALQRPLVPRILIHGL |
| | RAPH1 | QAAPPTPTPPVPPAKKQPAFPASYIPPSPPTPPVPVPP |
| | | PTLPKQQSFCAKPPPSPLSPVPSV |
| | NOTO | SRVRPPRSGRSPAPRSPTGPNTPRAPGRFESPFSVEAI |
| | | LARPDPCAPAASQPSGSACVHPAF |
| | SNAI3 | PRASRAAIVPLKDSLNHLNLPPLLVLPTRWSPTLGPD |
| | | RHGAPEKLLGAERMPRAPGGFECFH |
| | CYP4F22 | IYGTHHNPTVWPDSKVYNPYRFDPDNPQQRSPLAY |
| | | VPFSAGPRNCIGQSFAMAELRVVVALT |
| | BCL9_0 | EMNRMIPGSQRHMEPGNNPIFPRIPVEGPLSPSRGDF |
| | | PKGIPPQMGPGRELEFGMVPSGMKG |
| | BCL9_1 | PGINPLKSPTMHQVQSPMLGSPSGNLKSPQTPSQLA |
| | | GMLAGPAAAASIKSPPVLGSAAASPV |
| | BCL9_2 | AGMLAGPAAAASIKSPPVLGSAAASPVHLKSPSLPA |
| | | PSPGWTSSPKPPLQSPGIPPNHKAPL |
| 2227 | UTF1_0 | RKRPRRRSPGSGRPQRARRPVPNAHAPAPSEPDATP |
| | | LPTARDRDADPTWTLRFSPSPPKSAD |
| | UTF1_1 | ATPLPTARDRDADPTWTLRFSPSPPKSADASPAPGSP |
| | | PAPAPTALATCIPEDRAPVRGPGSP |
| | MICALL2_0 | GGMAGVKRASEDSEEEPSGKKAPVQAAKLPSPAPA |
| | | RKPPLSPAQTNPVVQRRNEGAGGPPPK |
| | MICALL2_1 | KDSSKEQARNFLKQALSALEEAGAPAPGRPSPATAA |
| | | VPSSQPKTEAPQASPLAKPLQSSSPR |
| | MICALL2_2 | EEEKKPHLQGKPGRPLSPANVPALPGETVTSPVRLH |
| | | PDYLSPEEIQRQLQDIERRLDALELR |
| | POU6F1_0 | PQLLLNAQGQVIATLASSPLPPPVAVRKPSTPESPAK |
| | | SEVQPIQPTPTVPQPAVVIASPAPA |
| | POU6F1_1 | ASSPLPPPVAVRKPSTPESPAKSEVQPIQPTPTVPQPA |
| | | VVIASPAPAAKPSASAPIPITCSE |
| 2228 | PANK4 | GPAQRARSGTFDLLEMDRLERPLVDLPLLLDPPSYV |
| | | PDTVDLTDDALARKYWLTCFEEALDG |
| | MICAL3 | DAPSDLKAVHSPIRSQPVTLPEARTPVSPGSPQPQPP |
| | | VAASTPPPSPLPICSQPQPSTEATV |
| 2229 | ASHIL_0 | KEMPQLEGPPKRTLKIPASKVFSLQSKEEQEPPILQP |
| | | EIEIPSFKQGLSVSPFPKKRGRPKR |
| | ASHIL_1 | VFSLQSKEEQEPPILQPEIEIPSFKQGLSVSPFPKKRGR |
| | | PKRQMRSPVKMKPPVLSVAPFVA |
| | LCP2 | DEDDVHQRPLPQPALLPMSSNTFPSRSTKPSPMNPLP |
| | | SSHMPGAFSESNSSFPQSASLPPYF |
| | LHX5 | PLGALEPPLAGPHAADNPRFTDMISHPDTPSPEPGLP |
| | | GTLHPMPGEVFSGGPSPPFPMSGTS |
| 2230 | UBXN7 | LAKSRKSPHKDLGHRKEENRRPLTEPPVRTDPGTAT |
| | | NHQGLPAVDSEILEMPPEKADGVVEG |
| 2231 | SHROOM2 | RVLRATSFKRRDLDPNPGDLYPESLEHRMGDPDTVP |
| | | HFWEAGLAQPPSSTSGGPHPPRIGGR |
| 2232 | FLAD1 | EKTRVFLEGSTRTPALPHCLFWLLQVPSTQDPLFPG |
| | | YGPQCPVDLAGPPCLRPLFGGLGGYW |
| | PRICKLE3 | EYAWVPPGLKPEQVYQFFSCLPEDKVPYVNSPGEK |
| | | YRIKQLLHQLPPHDSEAQYCTALEEEE |
| | MAP3K1_0 | NSPSGRTVKSESPGVRRKRVSPVPFQSGRITPPRRAP |
| | | SPDGFSPYSPEETNRRVNKVMRARL |
| | MAP3K1_1 | MVQTKGRPHSQCLNSSPLSHHSQLMFPALSTPSSSTP |
| | | SVPAGTATDVSKHRLQGFIPCRIPS |
| | DYNCILI1 | KLQSLLAKQPPTAAGRPVDASPRVPGGSPRTPNRSV |
| | | SSNVASVSPIPAGSKKIDPNMKAGAT |
| | ZFHX3 | FDNTPLQALNLPTAYPALQGIPPVLLPGLNSPSLPGF |
| | | TPSNTALTSPKPNLMGLPSTTVPSP |
| | CCNO | LHPLNPCPLPGDSGICDLFESPSSGSDGAESPSAARG |
| | | GSPLPGPAQPVAQLDLQTFRDYGQS |
| 2233 | VEZF1 | TAFLFQAHEASHHQQQAAQNSLLPLLSSAVEPPDQK |
| | | PLLPIPITQKPQGAPETLKDAIGIKK |
| | WAC_0 | SHSCTTPSTSSASGLNPTSAPPTSASAVPVSPVPQSPI |
| | | PPLLQDPNLLRQLLPALQATLQLN |
| | WAC_1 | SPRISTPQTNTVPIKPLISTPPVSSQPKVSTPVVKQGP |
| | | VSQSATQQPVTADKQQGHEPVSPR |
| 2234 | SPAG17_0 | NEKPVLEAMPTSEAPQPAVPAPGKKKAQYEEPQAP |
| | | PPVTSVITTEVDMRYYNYLLNPIREEF |
| 2235 | SPAG17_1 | SLKKKSPYKEKSKEEQVKIQEVTEESPHQPEPKITYP |
| | | FHGYNMGNIPTQISGSNYYLYPSDG |
| | SCML2 | LPTQQVRRSSRIKPPGPTAVPKRSSSVKNITPRKKGP |
| | | NSGKKEKPLPVICSTSAASLKSLTR |
| 2236 | ZNF512B_0 | FPCTHCGKTYRSKAGHDYHVRSEHTAPPPEEPTDKS |
| | | PEAEDPLGVERTPSGRVRRTSAQVAV |
| | ZNF512B_1 | CGKTYRSKAGHDYHVRSEHTAPPPEEPTDKSPEAED |
| | | PLGVERTPSGRVRRTSAQVAVFHLQE |
| 2237 | ZNF512B_2 | RSKAGHDYHVRSEHTAPPPEEPTDKSPEAEDPLGVE |
| | | RTPSGRVRRTSAQVAVFHLQEIAEDE |
| | SCYL1_0 | AVTGVSSLTSKLIRSHPTTAPTETNIPQRPTPEGVPAP |
| | | APTPVPATPTTSGHWETQEEDKDT |
| | SCYL1_1 | KLIRSHPTTAPTETNIPQRPTPEGVPAPAPTPVPATPT |
| | | TSGHWETQEEDKDTAEDSSTADRW |
| | TRIOBP_0 | ISRASSTQQETSRASSTQEDTPRASSTQEDTPRASST |
| | | QWNTPRASSPSRSTQLDNPRTSSTQ |
| 2238 | TRIOBP_1 | SSTQQDNPQTSFPTCTPQRENPRTPCVQQDDPRASSP |
| | | NRTTQRENSRTSCAQRDNPKASRTS |
| | TRIOBP_2 | AAYGAPLTSPEPSQPPCAVCIGHRDAPRASSPPRYLQ |
| | | HDPFPFFPEPRAPESEPPHHEPPYI |
| 2239 | TRIOBP_3 | SPEPSQPPCAVCIGHRDAPRASSPPRYLQHDPFPFFPE |
| | | PRAPESEPPHHEPPYIPPAVCIGH |
| 2240 | TRIOBP_4 | RASSPPRYLQHDPFPFFPEPRAPESEPPHHEPPYIPPA |
| | | VCIGHRDAPRASSPPRHTQFDPFP |
| | TRIOBP_5 | RAPESEPPHHEPPYIPPAVCIGHRDAPRASSPPRHTQF |
| | | DPFPFLPDTSDAEHQCQSPQHEPL |
| | TRIOBP_6 | AEHQCQSPQHEPLQLPAPVCIGYRDAPRASSPPRQA |
| | | PEPSLLFQDLPRASTESLVPSMDSLH |
| | TRIOBP_7 | SLVPSMDSLHECPHIPTPVCIGHRDAPSFSSPPRQAPE |
| | | PSLFFQDPPGTSMESLAPSTDSLH |
| | TRIOBP_8 | SLAPSTDSLHGSPVLIPQVCIGHRDAPRASSPPRHPPS |
| | | DLAFLAPSPSPGSSGGSRGSAPPG |
| 2241 | SIPA1L3 | SPQKGLQRTLSDESLCSGRREPSFASPAGLEPGLPSD |
| | | VLFTSTCAFPSSTLPARRQHQHPHP |
| | NELFA | LNNEPALPSTSYLPSTPSVVPASSYIPSSETPPAPSSRE |
| | | ASRPPEEPSAPSPTLPAQFKQRA |
| 2242 | BCR_0 | QAPDGASEPRASASRPQPAPADGADPPPAEEPEARP |
| | | DGEGSPGKARPGTARRPGAAASGERD |
| | BCR_1 | ASASRPQPAPADGADPPPAEEPEARPDGEGSPGKAR |
| | | PGTARRPGAAASGERDDRGPPASVAA |
| 2243 | EPS15_0 | DPFRSATSSSVSNVVITKNVFEETSVKSEDEPPALPP |
| | | KIGTPTRPCPLPPGKRSINKLDSPD |
| | EPS15_1 | VSNVVITKNVFEETSVKSEDEPPALPPKIGTPTRPCPL |
| | | PPGKRSINKLDSPDPFKLNDPFQP |
| 2244 | EPS15_2 | KIGTPTRPCPLPPGKRSINKLDSPDPFKLNDPFQPFPG |
| | | NDSPKEKDPEIFCDPFTSATTTTN |
| | EPS15_3 | LPPGKRSINKLDSPDPFKLNDPFQPFPGNDSPKEKDP |
| | | EIFCDPFTSATTTTNKEADPSNFAN |
| 2245 | EPS15_4 | RSINKLDSPDPFKLNDPFQPFPGNDSPKEKDPEIFCDP |
| | | FTSATTTTNKEADPSNFANFSAYP |
| | JCAD | HSQQQSPTEKAGASGQPPSGPPGTGNEYGVSPRLPQ |
| | | GLPAHPRPVTAYDGFVQYIPFDDPRL |
| | EP400 | QAAQLAGQRQSQQQYDPSTGPPVQNAASLHTPLPQ |
| | | LPGRLPPAGVPTAALSSALQFAQQPQV |
| | SGIP1 | ESAFDEQKTEVLLDQPEIWGSGQPINPSMESPKLTRP |
| | | FPTGTPPPLPPKNVPATPPRTGSPL |
| | FBXO42 | GQCVVVFSQAPSGRAPLSPSLNSRPSPISATPPALVPE |
| | | TREYRSQSPVRSMDEAPCVNGRWG |
| 2246 | ZNF574_0 | GVGGVPLPTTPVPPEEPVIGFPEPAPAETGEPEAPEPP |
| | | VSEETSAGPAAPGTYRCLLCSREF |
| 2247 | ZNF574_1 | PLPTTPVPPEEPVIGFPEPAPAETGEPEAPEPPVSEETS |
| | | AGPAAPGTYRCLLCSREFGKALQ |
| | SP2_0 | SPLALLAATCSKIGPPAVEAAVTPPAPPQPTPRKLVPI |
| | | KPAPLPLSPGKNSFGILSSKGNIL |
| | SP2_1 | PAVEAAVTPPAPPQPTPRKLVPIKPAPLPLSPGKNSF |
| | | GILSSKGNILQIQGSQLSASYPGGQ |
| 2248 | COL4A1_0 | GYGPAGPIGDKGQAGFPGGPGSPGLPGPKGEPGKIV |
| | | PLPGPPGAEGLPGSPGFPGPQGDRGF |
| | COL4A1_1 | PGSPGLPGPKGEPGKIVPLPGPPGAEGLPGSPGFPGP |
| | | QGDRGFPGTPGRPGLPGEKGAVGQP |
| | COL4A1_2 | IVPLPGPPGAEGLPGSPGFPGPQGDRGFPGTPGRPGL |
| | | PGEKGAVGQPGIGFPGPPGPKGVDG |
| 2249 | COL4A1_3 | LPGLDGIPGVKGEAGLPGTPGPTGPAGQKGEPGSDG |
| | | IPGSAGEKGEPGLPGRGFPGFPGAKG |
| 2250 | ZC3H12C | YGYRQTYSLPDNSTQPCYEQFTFQSLPEQQEPAWRI |
| | | PYCGMPQDPPRYQDNREKIYINLCNI |
| | CHAF1B_0 | VLNMRTPDTAKKTKSQTHRGSSPGPRPVEGTPASRT |
| | | QDPSSPGTTPPQARQAPAPTVIRDPP |
| | CHAF1B_1 | KKTKSQTHRGSSPGPRPVEGTPASRTQDPSSPGTTPP |
| | | QARQAPAPTVIRDPPSITPAVKSPL |
| 2251 | CHAF1B_2 | GTPASRTQDPSSPGTTPPQARQAPAPTVIRDPPSITPA |
| | | VKSPLPGPSEEKTLQPSSQNTKAH |
| | C6orf132_0 | RSPAEPKGSALGPNPEPHLTFPRSFKVPPPTPVRTSSI |
| | | PVQEAQEAPRKEEGATKKAPSRLP |
| | C6orf132_1 | KNLPPQSTTLLPTTSLQPKAMLGPAIPPKATPEPAIPP |
| | | KATLWPATPPKATLGPATPLKATS |
| | C6orf132_2 | LQPKAMLGPAIPPKATPEPAIPPKATLWPATPPKATL |
| | | GPATPLKATSGPTTPLKATSGPAIA |
| | PCGF2_0 | SGASECESVSDKAPSPATLPATSSSLPSPATPSHGSPS |
| | | SHGPPATHPTSPTPPSTASGATTA |
| | PCGF2_1 | CESVSDKAPSPATLPATSSSLPSPATPSHGSPSSHGPP |
| | | ATHPTSPTPPSTASGATTAANGGS |
| | PCGF2_2 | ATSSSLPSPATPSHGSPSSHGPPATHPTSPTPPSTASG |
| | | ATTAANGGSLNCLQTPSSTSRGRK |
| | SRCAP_0 | GPALLTSVTPPLAPVVPAAPGPPSLAPSGASPSASAL |
| | | TLGLATAPSLSSSQTPGHPLLLAPT |
| | SRCAP_1 | GAASTLVPGVSETSASPGSPSVRSMSGPESSPPIGGP |
| | | CEAAPSSSLPTPPQQPFIARRHIEL |
| 2252 | SRCAP_2 | RGVDEAPSSTLKGKTNGADPVPGPETLIVADPVLEP |
| | | QLIPGPQPLGPQPVHRPNPLLSPVEK |
| | SRCAP_3 | IVADPVLEPQLIPGPQPLGPQPVHRPNPLLSPVEKRR |
| | | RGRPPKARDLPIPGTISSAGDGNSE |
| | SYNPO2_0 | RMVPMNRTAKPFPGSVNQPATPFSPTRNMTSPIADF |
| | | PAPPPYSAVTPPPDAFSRGVSSPIAG |
| | SYNPO2_1 | MKQALPPRPVNAASPTNVQASSVYSVPAYTSPPSFF |
| | | AEASSPVSASPVPVGIPTSPKQESAS |
| | SYNPO2_2 | NAASPTNVQASSVYSVPAYTSPPSFFAEASSPVSASP |
| | | VPVGIPTSPKQESASSSYFVAPRPK |
| | CHRNA10_0 | ARALLLGHLARGLCVRERGEPCGQSRPPELSPSPQSP |
| | | EGGAGPPAGPCHEPRCLCRQEALLH |
| | CHRNA10_1 | LGHLARGLCVRERGEPCGQSRPPELSPSPQSPEGGA |
| | | GPPAGPCHEPRCLCRQEALLHHVATI |
| 2253 | CNKSR1 | FDLSSNPSPGPSPAWTDSASLGPEPLPIPPEPPAILPAG |
| | | VAGTPGLPESPDKSPVGRKKSKG |
| 2254 | ZNF174 | AKGAKPCAVSAGRSKGNGLQNPEPRGANMSEPRLS |
| | | RRQVSSPNAQKPFAHYQRHCRVEYISS |
| 2255 | CCNK | PKIETTHPPLPPAHPPPDRKPPLAAALGEAEPPGPVD |
| | | ATDLPKVQIPPPAHPAPVHQPPPLP |
| | KIAA1522_0 | LPRPPTTGGSEGAGAAPCPPNPANSWVPGLSPGGSR |
| | | RPPRSPERTLSPSSGYSSQSGTPTLP |
| | KIAA1522_1 | APSDRSGPQILTPLGDRFVIPPHPKVPAPFSPPPSKPR |
| | | SPNPAAPALAAPAVVPGPVSTTDA |
| | KIAA1522_2 | MADFPPPEEAFFSVASPEPAGPSGSPELVSSPAASSSS |
| | | ATALQIQPPGSPDPPPAPPAPAPA |
| | KIAA1522_3 | SPETQADLQRNLVAELRSISEQRPPQAPKKSPKAPPP |
| | | VARKPSVGVPPPASPSYPRAEPLTA |
| | KIAA1522_4 | EQRPPQAPKKSPKAPPPVARKPSVGVPPPASPSYPRA |
| | | EPLTAPPTNGLPHTQDRTKRELAEN |
| 2256 | KIAA1522_5 | PKKSPKAPPPVARKPSVGVPPPASPSYPRAEPLTAPP |
| | | TNGLPHTQDRTKRELAENGGVLQLV |
| | BCLAF1_0 | DEFNKSSATSGDIWPGLSAYDNSPRSPHSPSPIATPPS |
| | | QSSSCSDAPMLSTVHSAKNTPSQH |
| | BCLAF1_1 | KNTPSQHSHSIQHSPERSGSGSVGNGSSRYSPSQNSPI |
| | | HHIPSRRSPAKTIAPQNAPRDESR |
| | BCLAF1_2 | QHSHSIQHSPERSGSGSVGNGSSRYSPSQNSPIHHIPS |
| | | RRSPAKTIAPQNAPRDESRGRSSF |
| | BCLAF1_3 | ERSGSGSVGNGSSRYSPSQNSPIHHIPSRRSPAKTIAP |
| | | QNAPRDESRGRSSFYPDGGDQETA |
| | JPH1 | DYVKQRFQEGVDAKENPEEKVPEKPPTPKESPHFYR |
| | | KGTTPPRSPEASPKHSHSPASSPKPL |
| | NCOA2 | YALKMNSPSQSSPGMNPGQPTSMLSPRHRMSPGVA |
| | | GSPRIPPSQFSPAGSLHSPVGVCSSTG |
| | RBSN | AVAGNPFIQPDSPAPNPFSEEDEHPQQRLSSPLVPGN |
| | | PFEEPTCINPFEMDSDSGPEAEEPI |
| | PDLIM5 | LDSPTSGRPGVTSLTAAAAFKPVGSTGVIKSPSWQR |
| | | PNQGVPSTGRISNSATYSGSVAPANS |
| 2257 | ZNF219_0 | LTAHGAPERPLAATSAAPPPQPQPQPPPQPEPRSVPQ |
| | | PEPEPEPEREATPTPAPAAPEEPPA |
| 2258 | ZNF219_1 | LAATSAAPPPQPQPQPPPQPEPRSVPQPEPEPEPEREA |
| | | TPTPAPAAPEEPPAPPEFRCQVCG |
| | HOXC4 | RGHGPAQAGHHHPEKSQSLCEPAPLSGASASPSPAP |
| | | PACSQPAPDHPSSAASKQPIVYPWMK |
| | PPP1R13L_0 | GSPRKAATDGADTPFGRSESAPTLHPYSPLSPKGRPS |
| | | SPRTPLYLQPDAYGSLDRATSPRPR |
| | PPP1R13L_1 | LQPQPQPQPQPQSQPQPQLPPQPQTQPQTPTPAPQHP |
| | | QQTWPPVNEGPPKPPTELEPEPEIE |
| 2259 | PPP1R13L_2 | QPQTPTPAPQHPQQTWPPVNEGPPKPPTELEPEPEIE |
| | | GLLTPVLEAGDVDEGPVARPLSPTR |
| | PPP1R13L_3 | HPQQTWPPVNEGPPKPPTELEPEPEIEGLLTPVLEAG |
| | | DVDEGPVARPLSPTRLQPALPPEAQ |
| | FAM184A | NRFVSVPNLSALESGGVGNGHPNRLDPIPNSPVHDIE |
| | | FNSSKPLPQPVPPKGPKTFLSPAQS |
| 2260 | CYFIP2 | FWELNFDFLPNYCYNGSTNRFVRTAIPFTQEPQRDK |
| | | PANVQPYYLYGSKPLNIAYSHIYSSY |
| | SCRIB | YRALAAVPSAGSVQRVPSGAAGGKMAESPCSPSGQ |
| | | QPPSPPSPDELPANVKQAYRAFAAVPT |
| | ARHGEF17_0 | RGAWPSVTEMRKLFGGPGSRRPSADSESPGTPSPDG |
| | | AAWEPPARESRQPPTPPPRTCFPLAG |
| | ARHGEF17_1 | IAVCSARILCIGAVPGLQPRCHREPPPSLRSPPETAPE |
| | | PAGPELDVEAAADEEAATLAEPGP |
| | ATN1_0 | SDSSSGLSQGPARPYHPPPLFPPSPQPPDSTPRQPEAS |
| | | FEPHPSVTPTGYHAPMEPPTSRMF |
| 2261 | ATN1_1 | PQPPDSTPRQPEASFEPHPSVTPTGYHAPMEPPTSRM |
| | | FQAPPGAPPPHPQLYPGGTGGVLSG |
| | ATN1_2 | ASGPPLSATQIKQEPAEEYETPESPVPPARSPSPPPKV |
| | | VDVPSHASQSARFNKHLDRGFNSC |
| 2262 | ARMH4_0 | LTTNPKTEKFEADTDHRTTSFPGAESTAGSEPGSLTP |
| | | DKEKPSQMTADNTQAAATKQPLETS |
| | ARMH4_1 | KTEKFEADTDHRTTSFPGAESTAGSEPGSLTPDKEKP |
| | | SQMTADNTQAAATKQPLETSEYTLS |
| 2263 | HOMEZ | PPPVPAPEQVGIGIGPPTLSKPTQTKGLKVEPEEPSQ |
| | | MPPLPQSHQKLKESLMTPGSGAFPY |
| 2264 | TRIL_0 | PSPSVAAAAGPAPQSLDLHKKPQRGRPTRADPALAE |
| | | PTPTASPGSAPSPAGDPWQRATKHRL |
| 2265 | TRIL_1 | AAAAGPAPQSLDLHKKPQRGRPTRADPALAEPTPT |
| | | ASPGSAPSPAGDPWQRATKHRLGTEHQ |
| 2266 | TSC22D4_0 | TDYEGPGSPGASDPPTPQPPTGPPPRLPNGEPSPDPG |
| | | GKGTPRNGSPPPGAPSSRFRVVKLP |
| | TSC22D4_1 | YEGPGSPGASDPPTPQPPTGPPPRLPNGEPSPDPGGK |
| | | GTPRNGSPPPGAPSSRFRVVKLPHG |
| | TSC22D4_2 | ASDPPTPQPPTGPPPRLPNGEPSPDPGGKGTPRNGSP |
| | | PPGAPSSRFRVVKLPHGLGEPYRRG |
| | TSC22D4_3 | TPQPPTGPPPRLPNGEPSPDPGGKGTPRNGSPPPGAP |
| | | SSRFRVVKLPHGLGEPYRRGRWTCV |
| 2267 | ADGRA2 | GLTCTAFQRREGGVPGTRPGSPGQNPPPEPEPPADQ |
| | | QLRFRCTTGRPNVSLSSFHIKNSVAL |
| | BCAR3_0 | HGTLPRKKKGPPPIRSCDDFSHMGTLPHSKSPRQNSP |
| | | VTQDGIQESPWQDRHGETFTFRDPH |
| | BCAR3_1 | RKKKGPPPIRSCDDFSHMGTLPHSKSPRQNSPVTQD |
| | | GIQESPWQDRHGETFTFRDPHLLDPT |
| | SMAD5_0 | LLVQFRNLSHNEPHMPQNATFPDSFHQPNNTPFPLS |
| | | PNSPYPPSPASSTYPNSPASSGPGSP |
| | SMAD5_1 | RNLSHNEPHMPQNATFPDSFHQPNNTPFPLSPNSPYP |
| | | PSPASSTYPNSPASSGPGSPFQLPA |
| 2268 | RIPOR1 | SYTQADPMAPRTPHPSPAHSSRKPLTSPAPDPSESTV |
| | | QSLSPTPSPPTPAPQHSDLCLAMAV |
| | ARGFX | KKQQQQQSAKQRNQILPSKKNVPTSPRTSPSPYAFS |
| | | PVISDFYSSLPSQPLDPSNWAWNSTF |
| 2269 | NFATC2 | AGLLVEQPPLAGVAASPRFTLPVPGFEGYREPLCLSP |
| | | ASSGSSASFISDTFSPYTSPCVSPN |
| | SYNPO_0 | VLRPEPTKQPPYQLRPSLFVLSPIKEPAKVSPRAASP |
| | | AKPSSLDLVPNLPKGALPPSPALPR |
| | SYNPO_1 | PTKQPPYQLRPSLFVLSPIKEPAKVSPRAASPAKPSSL |
| | | DLVPNLPKGALPPSPALPRPSRSS |
| | CHAMP1_0 | PEHQKIPCNSAEPKSIPALSMETQKLGSVLSPESPKPT |
| | | PLTPLEPQKPGSVVSPELQTPLPS |
| | CHAMP1_1 | SPEPPKSVPVCESQKLAPVPSPEPQKPAPVSPESVKA |
| | | TLSNPKPQKQSHFPETLGPPSASSP |
| | PLEKHA7_0 | KNPERKTVPLFPHPPVPSLSTSESKPPPQPSPPTSPVR |
| | | TPLEVRLFPQLQTYVPYRPHPPQL |
| | PLEKHA7_1 | LEVRLFPQLQTYVPYRPHPPQLRKVTSPLQSPTKAK |
| | | PKVEDEAPPRPPLPELYSPEDQPPAV |
| | PLEKHA7_2 | KVTSPLQSPTKAKPKVEDEAPPRPPLPELYSPEDQPP |
| | | AVPPLPREATIIRHTSVRGLKRQSD |
| | SEC24C | SQPNHVSSPPQALPPGTQMTGPLGPLPPMHSPQQPG |
| | | YQPQQNGSFGPARGPQSNYGGPYPAA |
| | ARHGEF10 | QAPSAPETGGAGASEAPAPTGGEDGAGAETTPVAEP |
| | | TKLVLPMKVNPYSVIDITPFQEDQPP |
| | EVL | SEAGRKPWERSNSVEKPVSSILSRTPSVAKSPEAKSP |
| | | LQSQPHSRMKPAGSVNDMALDAFDL |
| | PLIN1_0 | AERRASGAPSAGPEPAPRLAQPRRSLRSAQSPGAPP |
| | | GPGLEDEVATPAAPRPGFPAVPREKP |
| | PLIN1_1 | APRLAQPRRSLRSAQSPGAPPGPGLEDEVATPAAPR |
| | | PGFPAVPREKPKRRVSDSFFRPSVME |
| | THRAP3 | WPDATYGTGSASRASAVSELSPRERSPALKSPLQSV |
| | | VVRRRSPRPSPVPKPSPPLSSTSQMG |
| | PLEKHG4 | VLSEGPGPSGVESLLCPMSSHLSLAQGESDTPGVGL |
| | | VGDPGPSRAMPSGLSPGALDSDPVGL |
| | FNBP4 | DSTLANFLAEIDAITAPQPAAPVGASAPPPTPPRPEPK |
| | | EAATSTLSSSTSNGTDSTQTSGWQ |
| | RREB1_0 | EEAGSSEQPSPCPAPGPSLPVTLGPSGILESPMAPAPA |
| | | ATPEPPAQPLQGPVQLAVPIYSSA |
| | RREB1_1 | ASATKDCSHREEKVTAGWPSEPGQGDLNPESPAAL |
| | | GQDLLEPRSKRPAHPILATADGASQLV |
| | IRX2_0 | LKQPSLGPGCGPPGLPAAAAPASTGAPPGGSPYPAS |
| | | PLLGRPLYYTSPFYGNYTNYGNLNAA |
| | IRX2_1 | LGPGCGPPGLPAAAAPASTGAPPGGSPYPASPLLGR |
| | | PLYYTSPFYGNYTNYGNLNAALQGQG |
| 2270 | KATNAL1 | QVKSIVSTLESFKIDKPPDFPVSCQDEPFRDPAVWPP |
| | | PVPAEHRAPPQIRRPNREVRPLRKE |
| 2271 | GAB3 | GLGPHCSPDDYIPMNSGSISSPLPELPANLEPPPVNR |
| | | DLKPQRKSRPPPLDLRNLSIIREHA |
| | PDHX | DALKLVQLKQTGKITESRPTPAPTATPTAPSPLQATA |
| | | GPSYPRPVIPPVSTPGQPNAVGTFT |
| 2272 | CDK12 | EKEQRTRHLLTDLPLPPELPGGDLSPPDSPEPKAITPP |
| | | QQPYKKRPKICCPRYGERRQTESD |
| | SALL2 | PFSAGGVGRSHKPTPAPSPALPGSTDQLIASPHLAFP |
| | | STTGLLAAQCLGAARGLEATASPGL |
| | AUTS2_0 | PLSTQPPQGPPEAQLQPAPQPQVQRPPRPQSPTQLLH |
| | | QNLPPVQAHPSAQSLSQPLSAYNSS |
| 2273 | AUTS2_1 | AKQLARVPSPYVRTPVVESARPNSTSSREAEPRKGE |
| | | PAYENPKKSSEVKVKEERKEDHDLPP |
| 2274 | AUTS2_2 | RVPSPYVRTPVVESARPNSTSSREAEPRKGEPAYENP |
| | | KKSSEVKVKEERKEDHDLPPEAPQT |
| | FOSL1_0 | MSGSQELQWMVQPHFLGPSSYPRPLTYPQYSPPQPR |
| | | PGVIRALGPPPGVRRRPCEQISPEEE |
| | FOSL1_1 | RPVPCISLSPGPVLEPEALHTPTLMTTPSLTPFTPSLV |
| | | FTYPSTPEPCASAHRKSSSSSGDP |
| 2275 | SOWAHB_0 | ARHPQVPEARDQGPIRAWSVLPDNFLQLPLEPGSTE |
| | | PNSEPPDPCLSSHSLFPVVPDESWES |
| 2276 | SOWAHB_1 | VPEARDQGPIRAWSVLPDNFLQLPLEPGSTEPNSEPP |
| | | DPCLSSHSLFPVVPDESWESWAGNP |
| | BSX | KPLREVAPDHFASSLASRVPLLDYGYPLMPTPTLLA |
| | | PHAHHPLHKGDHHHPYFLTTSGMPVP |
| 2277 | PRRC2A_0 | SLKAENKGNDPNVSLVPKDGTGWASKQEQSDPKSS |
| | | DASTAQPPESQPLPASQTPASNQPKRP |
| 2278 | PRRC2A_1 | EADGKKGNSPNSEPPTPKTAWAETSRPPETEPGPPA |
| | | PKPPLPPPHRGPAGNWGPPGDYPDRG |
| 2279 | PRRC2A_2 | PSTPAPPPAVPKELPAPPAPPPASAPTPETEPEEPAQA |
| | | PPAQSTPTPGVAAAPTLVSGGGST |
| 2280 | PRRC2A_3 | PAPPPAVPKELPAPPAPPPASAPTPETEPEEPAQAPPA |
| | | QSTPTPGVAAAPTLVSGGGSTSST |
| 2281 | PRRC2A_4 | VSGGGSTSSTSSGSFEASPVEPQLPSKEGPEPPEEVPP |
| | | PTTPPVPKVEPKGDGIGPTRQPPS |
| | PRRC2A_5 | VSSGPCSQRSSPDGGLKGAAEGPPKRPGGSSPLNAV |
| | | PCEGPPGSEPPRRPPPAPHDGDRKEL |
| | PRRC2A_6 | PLSLLPVGPALQPPSLAVRPPPAPATRVLPSPARPFPA |
| | | SLGRAELHPVELKPFQDYQKLSSN |
| | DBNDD1 | AEVFADSDDENLNTESPAGLHPLPRAGYLRSPSWTR |
| | | TRAEQSHEKQPLGDPERQATVLDTFL |
| | TENT2 | YSLVLMVLHYLQTLPEPILPSLQKIYPESFSPAIQLHL |
| | | VHQAPCNVPPYLSKNESNLGDLLL |
| | PACS2_0 | VVKVGIVEPSSATSGDSDDAAPSGSGTLSSTPPSASP |
| | | AAKEASPTPPSSPSVSGGLSSPSQG |
| | PACS2_1 | IVEPSSATSGDSDDAAPSGSGTLSSTPPSASPAAKEA |
| | | SPTPPSSPSVSGGLSSPSQGVGAEL |
| 2282 | HES7 | AHDASPAARAQLFSALHGYLRPKPPRPKPVDPRPPA |
| | | PRPSLDPAAPALGPALHQRPPVHQGH |
| | GRAMD1A | RASSDADHGAEEDKEEQVDSQPDASSSQTVTPVAEP |
| | | PSTEPTQPDGPTTLGPLDLLPSEELL |
| 2283 | TAF1C_0 | CSWRDALTLPEAQPQNSENGALHVTKDLLWEPATP |
| | | GPLPMLPPLIDPWDPGLTARDLLFRGG |
| 2284 | TAF1C_1 | NSENGALHVTKDLLWEPATPGPLPMLPPLIDPWDPG |
| | | LTARDLLFRGGCRYRKRPRVVLDVTE |
| 2285 | DENND4C | YPEEDYESFPLSESDVPLFCLPMGATIECWDPETKYP |
| | | LPVFSTFVLTGSSAKKVYGAAIQFY |
| 2286 | SHROOM1_0 | ALARGTGQPGSRPTWPSQCLEELVQELARLDPSLCD |
| | | PLASQPSPEPPLGLLDGLIPLAEVRA |
| 2287 | SHROOM1_1 | TGQPGSRPTWPSQCLEELVQELARLDPSLCDPLASQ |
| | | PSPEPPLGLLDGLIPLAEVRAAMRPA |
| | CHD4_0 | KVQEFEHVNGRWSMPELAEVEENKKMSQPGSPSPK |
| | | TPTPSTPGDTQPNTPAPVPPAEDGIKI |
| | CHD4_1 | EHVNGRWSMPELAEVEENKKMSQPGSPSPKTPTPST |
| | | PGDTQPNTPAPVPPAEDGIKIEENSL |
| | CHD4_2 | VNGRWSMPELAEVEENKKMSQPGSPSPKTPTPSTPG |
| | | DTQPNTPAPVPPAEDGIKIEENSLKE |
| | CHD4_3 | RWSMPELAEVEENKKMSQPGSPSPKTPTPSTPGDTQ |
| | | PNTPAPVPPAEDGIKIEENSLKEEES |
| | FAM168A | ASSAAFRYTAGTPYKVPPTQSNTAPPPYSPSPNPYQT |
| | | AMYPIRSAYPQQNLYAQGAYYTQPV |
| | HOXD12 | FYFSNLRPNGGQLAALPPISYPRGALPWAATPASCA |
| | | PAQPAGATAFGGFSQPYLAGSGPLGL |
| | CEP85 | PHSNSSGVLPLGLQPAPGLSKPLPSQVWQPSPDTWH |
| | | PREQSCELSTCRQQLELIRLQMEQMQ |
| | EIF4G1 | DDRSQGAIIADRPGLPGPEHSPSESQPSSPSPTPSPSPV |
| | | LEPGSEPNLAVLSIPGDTMTTIQ |
| | FCHO1_0 | SPENVEDSGLDSPSHAAPGPSPDSWVPRPGTPQSPPS |
| | | CRAPPPEARGIRAPPLPDSPQPLAS |
| | FCHO1_1 | QSPPSCRAPPPEARGIRAPPLPDSPQPLASSPGPWGLE |
| | | ALAGGDLMPAPADPTAREGLAAPP |
| | USP25 | LSYGSGPKRFPLVDVLQYALEFASSKPVCTSPVDDI |
| | | DASSPPSGSIPSQTLPSTTEQQGALS |
| | RXRB | EQQTPEPEPGEAGRDGMGDSGRDSRSPDSSSPNPLP |
| | | QGVPPPSPPGPPLPPSTAPSLGGSGA |
| | SNW1 | MQKDPMEPPRFKINKKIPRGPPSPPAPVMHSPSRKM |
| | | TVKEQQEWKIPPCISNWKNAKGYTIP |
| | APC_0 | KKQNLKNNSKVFNDKLPNNEDRVRGSFAFDSPHHY |
| | | TPIEGTPYCFSRNDSLSSLDFDDDDVD |
| | APC_1 | SRGRTMIHIPGVRNSSSSTSPVSKKGPPLKTPASKSPS |
| | | EGQTATTSPRGAKPSVKSELSPVA |
| | APC_2 | MIHIPGVRNSSSSTSPVSKKGPPLKTPASKSPSEGQT |
| | | ATTSPRGAKPSVKSELSPVARQTSQ |
| | APC_3 | SSSTSPVSKKGPPLKTPASKSPSEGQTATTSPRGAKP |
| | | SVKSELSPVARQTSQIGGSSKAPSR |
| 2288 | ARHGEF16 | MVRGSPRVRDDAAFQPQVPAPPQPRPPGHEEPWPIV |
| | | LSTESPAALKLGTQQLIPKSLAVASK |
| 2289 | CCNB1 | AKPSATGKVIDKKLPKPLEKVPMLVPVPVSEPVPEP |
| | | EPEPEPEPVKEEKLSPEPILVDTASP |
| 2290 | RNF43 | KRFQWHGRKPGPETGVPQSRPPIPRTQPQPEPPSPDQ |
| | | QVTRSNSAAPSGRLSNPQCPRALPE |
| | RAPGEF6 | SQSQDDSIVGTRHCRHSLAIMPIPGTLSSSSPDLLQPT |
| | | TSMLDFSNPSDIPDQVIRVFKVDQ |
| 2291 | SMTN_0 | PSSSPTPASPEPPLEPAEAQCLTAEVPGSPEPPPSPPKT |
| | | TSPEPQESPTLPSTEGQVVNKLL |
| | SMTN_1 | EPPLEPAEAQCLTAEVPGSPEPPPSPPKTTSPEPQESP |
| | | TLPSTEGQVVNKLLSGPKETPAAQ |
| | PKN1 | TGTLEVRVVGCRDLPETIPWNPTPSMGGPGTPDSRP |
| | | PFLSRPARGLYSRSGSLSGRSSLKAE |
| | ASXL2_0 | FQVSPQPFLNRGDRIQVRKVPPLKIPVSRISPMPFHPS |
| | | QVSPRARFPVSITSPNRTGARTLA |
| | ASXL2_1 | RGDRIQVRKVPPLKIPVSRISPMPFHPSQVSPRARFPV |
| | | SITSPNRTGARTLADIKAKAQLVK |
| | ASXL2_2 | FSSTVLPLPADSPTHQPLLLPPLQTPKLYGSPTQIGPS |
| | | YRGMINVSTSSDMDHNSAVPGSQV |
| | AOC1 | NENIENEDLVAWVTVGFLHIPHSEDIPNTATPGNSV |
| | | GFLLRPFNFFPEDPSLASRDTVIVWP |
| 2292 | TBX4 | MLQDKGLSESEEAFRAPGPALGEASAANAPEPALA |
| | | APGLSGAALGSPPGPGADVVAAAAAEQ |
| | MAP3K7 | ISGNGQPRRRSIQDLTVTGTEPGQVSSRSSSPSVRMIT |
| | | TSGPTSEKPTRSHPWTPDDSTDTN |
| | TEPSIN_0 | PLPGSQVFLQPLSSTPVSSRSPAPSSGMPSSPVPTPPP |
| | | DASPIPAPGDPSEAEARLAESRRW |
| 2293 | TEPSIN_1 | SSRSPAPSSGMPSSPVPTPPPDASPIPAPGDPSEAEAR |
| | | LAESRRWRPERIPGGTDSPKRGPS |
| | KIDINS220 | HSGKRGIPHSLSGLQDPIIARMSICSEDKKSPSECSLI |
| | | ASSPEENWPACQKAYNLNRTPSTV |
| | CAPRIN1_0 | FTSGEKEQVDEWTVETVEVVNSLQQQPQAASPSVP |
| | | EPHSLTPVAQADPLVRRQRVQDLMAQM |
| 2294 | CAPRIN1_1 | KEQVDEWTVETVEVVNSLQQQPQAASPSVPEPHSL |
| | | TPVAQADPLVRRQRVQDLMAQMQGPYN |
| | CAPRIN1_2 | EWTVETVEVVNSLQQQPQAASPSVPEPHSLTPVAQ |
| | | ADPLVRRQRVQDLMAQMQGPYNFIQDS |
| | TEAD4 | PGQAGTSHDVKPFSQQTYAVQPPLPLPGFESPAGPA |
| | | PSPSAPPAPPWQGRSVASSKLWMLEF |
| 2295 | ZNF687 | GRGTTLARGSSARAQGPGRKRRQSSDSCSEEPDSTT |
| | | PPAKSPRGGPGSGGHGPLRYRSSSST |
| | PRRC1 | PVRPSAPLPFVPPPAVPSVPPLVTSMPPPVSPSTAAAF |
| | | GNPPVSHFPPSTSAPNTLLPAPPS |
| | TMPRSS13_0 | SHGNASPARTPSAGASPAQASPAGTPPGRASPAQAS |
| | | PAQASPAGTPPGRASPAQASPAGTPP |
| | TMPRSS13_1 | SPARTPSAGASPAQASPAGTPPGRASPAQASPAQAS |
| | | PAGTPPGRASPAQASPAGTPPGRASP |
| | TMPRSS13_2 | PSAGASPAQASPAGTPPGRASPAQASPAQASPAGTP |
| | | PGRASPAQASPAGTPPGRASPGRASP |
| | TMPRSS13_3 | SPAGTPPGRASPAQASPAQASPAGTPPGRASPAQAS |
| | | PAGTPPGRASPGRASPAQASPAQASP |
| | TMPRSS13_4 | PPGRASPAQASPAQASPAGTPPGRASPAQASPAGTP |
| | | PGRASPGRASPAQASPAQASPARASP |
| | TMPRSS13_5 | SPAQASPAGTPPGRASPAQASPAGTPPGRASPGRASP |
| | | AQASPAQASPARASPALASLSRSSS |
| | TMPRSS13_6 | SPAGTPPGRASPAQASPAGTPPGRASPGRASPAQASP |
| | | AQASPARASPALASLSRSSSGRSSS |
| | TMPRSS13_7 | PPGRASPAQASPAGTPPGRASPGRASPAQASPAQAS |
| | | PARASPALASLSRSSSGRSSSARSAS |
| | TMPRSS13_8 | SPAQASPAGTPPGRASPGRASPAQASPAQASPARAS |
| | | PALASLSRSSSGRSSSARSASVTTSP |
| | TMPRSS13_9 | SPAGTPPGRASPGRASPAQASPAQASPARASPALAS |
| | | LSRSSSGRSSSARSASVTTSPTRVYL |
| | TMPRSS13_10 | SLSRSSSGRSSSARSASVTTSPTRVYLVRATPVGAVP |
| | | IRSSPARSAPATRATRESPGTSLPK |
| | TMPRSS13_11 | SSARSASVTTSPTRVYLVRATPVGAVPIRSSPARSAP |
| | | ATRATRESPGTSLPKFTWREGQKQL |
| | SUPT5H_0 | THSPASYHPTPSPMAYQASPSPSPVGYSPMTPGAPSP |
| | | GGYNPHTPGSGIEQNSSDWVTTDIQ |
| | SUPT5H_1 | SYHPTPSPMAYQASPSPSPVGYSPMTPGAPSPGGYN |
| | | PHTPGSGIEQNSSDWVTTDIQVKVRD |
| 2296 | ZNF750 | HGLATIYSPYLLAGSSPECDAPLLSVYGTQDPRHFLP |
| | | HPGPIPKHLAPSPATYDHYRFFQQY |
| 2297 | TJP1_0 | TPVKHADDHTPKTVEEVTVERNEKQTPSLPEPKPVY |
| | | AQVGQPDVDLPVSPSDGVLPNSTHED |
| 2298 | TJP1_1 | PPFDNQHSQDLDSRQHPEESSERGYFPRFEEPAPLSY |
| | | DSRPRYEQAPRASALRHEEQPAPGY |
| | SOX5 | ATAGVVYPGAIAMAGMPSPHLPSEHSSVSSSPEPGM |
| | | PVIQSTYGVKGEEPHIKEEIQAEDIN |
| 2299 | CSF1 | CNNSFAECSSQDVVTKPDCNCLYPKAIPSSDPASVSP |
| | | HQPLAPSMAPVAGLTWEDSEGTEGS |
| 2300 | AIRE_0 | SPPLREIPSGTWRCSSCLQATVQEVQPRAEEPRPQEP |
| | | PVETPLPPGLRSAGEEVRGPPGEPL |
| 2301 | AIRE_1 | EIPSGTWRCSSCLQATVQEVQPRAEEPRPQEPPVETP |
| | | LPPGLRSAGEEVRGPPGEPLAGMDT |
| | AIRE_2 | TWRCSSCLQATVQEVQPRAEEPRPQEPPVETPLPPG |
| | | LRSAGEEVRGPPGEPLAGMDTTLVYK |
| | SEC16A_0 | HGGHPHGNMPGLDRPLSRQNPHDGVVTPAASPSLP |
| | | QPGLQMPGQWGPVQGGPQPSGQHRSPC |
| | SEC16A_1 | PDGPLASPARVPMFPVPLPPGPLEPGPGCVTPGPALG |
| | | FLEPSGPGLPPGVPPLQERRHLLQE |
| | SEC16A_2 | GTQRSEPALAPADFVAPLAPLPIPSNLFVPTPDAEEP |
| | | QLPDGTGREGPAAARGLANPEPAPE |
| 2302 | SEC16A_3 | PDAEEPQLPDGTGREGPAAARGLANPEPAPEPKVLS |
| | | SAASLPGSELPSSRPEGSQGGELSRC |
| 2303 | MYO18B_0 | LGSSATPTKKTVPFKRGVRRGDVLLMVAKLDPDSA |
| | | KPEKTHPHDAPPCKTSPPATDTGKEKK |
| | MYO18B_1 | GDVLLMVAKLDPDSAKPEKTHPHDAPPCKTSPPAT |
| | | DTGKEKKGETSRTPCGSQASTEILAPK |
| 2304 | MYO18B_2 | GTVALKKGEEGQSIVGKGLGTPKTTELKEAEPQGK |
| | | DRQGTRPQAQGPGEGVRPGKAEKEGAE |
| | NAV2 | NSVKVNPAAQPVSSPAQTSLQPGAKYPDVASPTLRR |
| | | LFGGKPTKQVPIATAENMKNSVVISN |
| 2305 | DYSF | KQPTGASLVLQVSYTPLPGAVPLFPPPTPLEPSPTLP |
| | | DLDVVADTGGEEDTEDQGLTGDEAE |
| 2306 | USP28_0 | VMRNHWCSYLGQDIAENLQLCLGEFLPRLLDPSAEI |
| | | IVLKEPPTIRPNSPYDLCSRFAAVME |
| 2307 | USP28_1 | GQDIAENLQLCLGEFLPRLLDPSAEIIVLKEPPTIRPN |
| | | SPYDLCSRFAAVMESIQGVSTVTV |
| | TCF7L2_0 | LEEAAKRQDGGLFKGPPYPGYPFIMIPDLTSPYLPNG |
| | | SLSPTARTLHFQSGSTHYSAYKTIE |
| 2308 | TCF7L2_1 | HHVHPLTPLITYSNEHFTPGNPPPHLPADVDPKTGIP |
| | | RPPHPPDISPYYPLSPGTVGQIPHP |
| | TCF7L2_2 | HFTPGNPPPHLPADVDPKTGIPRPPHPPDISPYYPLSP |
| | | GTVGQIPHPLGWLVPQQGQPVYPI |
| 2309 | CHEK2_0 | SSQSSHSSSGTLSSLETVSTQELYSIPEDQEPEDQEPE |
| | | EPTPAPWARLWALQDGFANLECVN |
| 2310 | CHEK2_1 | HSSSGTLSSLETVSTQELYSIPEDQEPEDQEPEEPTPA |
| | | PWARLWALQDGFANLECVNDNYWF |
| | CHEK2_2 | TLSSLETVSTQELYSIPEDQEPEDQEPEEPTPAPWAR |
| | | LWALQDGFANLECVNDNYWFGRDKS |
| | IL15RA_0 | CIRDPALVHQRPAPPSTVTTAGVTPQPESLSPSGKEP |
| | | AASSPSSNNTAATTAAIVPGSQLMP |
| 2311 | IL15RA_1 | ALVHQRPAPPSTVTTAGVTPQPESLSPSGKEPAASSP |
| | | SSNNTAATTAAIVPGSQLMPSKSPS |
| | IL15RA_2 | RPAPPSTVTTAGVTPQPESLSPSGKEPAASSPSSNNT |
| | | AATTAAIVPGSQLMPSKSPSTGTTE |
| 2312 | ZSWIM8 | YSVTPPSLAATAVSFPVPSMAPITVHPYHTEPGLPLP |
| | | TSVACELWGQGTVSSVHPASTFPAI |
| | UHRF2 | LNDIIQLLVRPDPDHLPGTSTQIEAKPCSNSPPKVKK |
| | | APRVGPSNQPSTSARARLIDPGFGI |
| | PDLIM2_0 | DSSLEVLATRFQGSVRTYTESQSSLRSSYSSPTSLSPR |
| | | AGSPFSPPPSSSSLTGEAAISRSF |
| | PDLIM2_1 | VLATRFQGSVRTYTESQSSLRSSYSSPTSLSPRAGSPF |
| | | SPPPSSSSLTGEAAISRSFQSLAC |
| | PDLIM2_2 | FQGSVRTYTESQSSLRSSYSSPTSLSPRAGSPFSPPPSS |
| | | SSLTGEAAISRSFQSLACSPGLP |
| | PNPLA6 | HNYLGLTNELFSHEIQPLRLFPSPGLPTRTSPVRGSK |
| | | RMVSTSATDEPRETPGRPPDPTGAP |
| | GP1BA_0 | TQESTKEQTTFPPRWTPNFTLHMESITFSKTPKSTTE |
| | | PTPSPTTSEPVPEPAPNMTTLEPTP |
| 2313 | GP1BA_1 | TPNFTLHMESITFSKTPKSTTEPTPSPTTSEPVPEPAP |
| | | NMTTLEPTPSPTTPEPTSEPAPSP |
| | GP1BA_2 | TPKSTTEPTPSPTTSEPVPEPAPNMTTLEPTPSPTTPEP |
| | | TSEPAPSPTTPEPTSEPAPSPTT |
| | GP1BA_3 | TEPTPSPTTSEPVPEPAPNMTTLEPTPSPTTPEPTSEPA |
| | | PSPTTPEPTSEPAPSPTTPEPTS |
| | GP1BA_4 | EPVPEPAPNMTTLEPTPSPTTPEPTSEPAPSPTTPEPTS |
| | | EPAPSPTTPEPTSEPAPSPTTPE |
| | GP1BA_5 | PEPAPNMTTLEPTPSPTTPEPTSEPAPSPTTPEPTSEPA |
| | | PSPTTPEPTSEPAPSPTTPEPTP |
| | GP1BA_6 | EPTPSPTTPEPTSEPAPSPTTPEPTSEPAPSPTTPEPTSE |
| | | PAPSPTTPEPTPIPTIATSPTI |
| | GP1BA_7 | PSPTTPEPTSEPAPSPTTPEPTSEPAPSPTTPEPTSEPAP |
| | | SPTTPEPTPIPTIATSPTILVS |
| 2314 | GP1BA_8 | PTTPEPTSEPAPSPTTPEPTSEPAPSPTTPEPTSEPAPSP |
| | | TTPEPTPIPTIATSPTILVSAT |
| | GPIBA_9 | EPAPSPTTPEPTSEPAPSPTTPEPTSEPAPSPTTPEPTPI |
| | | PTIATSPTILVSATSLITPKST |
| 2315 | GP1BA_10 | PTTPEPTSEPAPSPTTPEPTSEPAPSPTTPEPTPIPTIAT |
| | | SPTILVSATSLITPKSTFLTTT |
| 2316 | PNPO | KDGFRFFTNFESRKGKELDSNPFASLVFYWEPLNRQ |
| | | VRVEGPVKKLPEEEAECYFHSRPKSS |
| | ADAMTS7 | FLPEEDTPIGAPDLGLPSLSWPRVSTDGLQTPATPES |
| | | QNDFPVGKDSQSQLPPPWRDRTNEV |
| | TRIB1 | LDADDAAAVAAKCPRLSECSSPPDYLSPPGSPCSPQ |
| | | PPPAAPGAGGGSGSAPGPSRIADYLL |
| 2317 | RRS1 | LARDNTQLLINQLWQLPTERVEEAIVARLPEPTTRLP |
| | | REKPLPRPRPLTRWQQFARLKGIRP |
| | GMEB1 | QNVVLMPVSTPKPPKRPRLQRPASTTVLSPSPPVQQ |
| | | PQFTVISPITITPVGQSFSMGNIPVA |
| | RNF213 | LPRGLQVGQPNLVVCGHSEVLPAALAVYMQTPSQP |
| | | LPTYDEVLLCTPATTFEEVALLLRRCL |
| | IFI16_0 | ALSRKRKKEVDATSPAPSTSSTVKTEGAEATPGAQN |
| | | PKTVAKCQVTPRRNVLQKRPVIVKVL |
| | IFI16_1 | LKEGSHFPGPFMTSIGPAESHPHTPQMPPSTPSSSFLT |
| | | TLKPRLKTEPEEVSIEDSAQSDLK |
| 2318 | EOGT | LMLFVFGVLLHEVSLSGQNEAPPNTHSIPGEPLYNY |
| | | ASIRLPEEHIPFFLHNNRHIATVCRK |
| | KDM2A_0 | KAQKRKMEESDEEAVQAKVLRPLRSCDEPLTPPPHS |
| | | PTSMLQLIHDPVSPRGMVTRSSPGAG |
| | KDM2A_1 | KMEESDEEAVQAKVLRPLRSCDEPLTPPPHSPTSML |
| | | QLIHDPVSPRGMVTRSSPGAGPSDHH |
| 2319 | AHCYL2 | LKDLSPSEAESQLGLSTAAVGAMAPPAGGGDPEAP |
| | | APAAERPPVPGPGSGPAAALSPAAGKV |
| | NRK | ASAILYAGFVEVPEESPKQPSEVNVNPLYVSPACKK |
| | | PLIHMYEKEFTSEICCGSLWGVNLLL |
| | CGNL1 | SNWLKTLTEEGINNKKPWTCFPKPSNSQPTSPSLEDP |
| | | AKSGVTAIRLCSSVVIEDPKKQTSV |
| | DMTN | STSPPPSPEVWADSRSPGIISQASAPRTTGTPRTSLPH |
| | | FHHPETSRPDSNIYKKPPIYKQRE |
| 2320 | B4GALNT4 | EDEVQRRAFLFLNPDDFLDDEDEGELLDSLEPTEAA |
| | | PPRSGPQSPAPAAPAQPGATLAPPTP |
| | PABPC4 | TAVQNLAPRAAVAAAAPRAVAPYKYASSVRSPHPA |
| | | IQPLQAPQPAVHVQGQEPLTASMLAAA |
| 2321 | E2F1_0 | SSQIVIISAAQDASAPPAPTGPAAPAAGPCDPDLLLF |
| | | ATPQAPRPTPSAPRPALGRPPVKRR |
| | E2F1_1 | AAQDASAPPAPTGPAAPAAGPCDPDLLLFATPQAPR |
| | | PTPSAPRPALGRPPVKRRLDLETDHQ |
| | E2F1_2 | PPAPTGPAAPAAGPCDPDLLLFATPQAPRPTPSAPRP |
| | | ALGRPPVKRRLDLETDHQYLAESSG |
| 2322 | KPRP_0 | QHRSRSTSRCLPPPRRLQLFPRSCSPPRRFEPCSSSYL |
| | | PLRPSEGFPNYCTPPRRSEPIYNS |
| | KPRP_1 | GASCPELRPHVEPRPLPSFCPPRRLDQCPESPLQRCPP |
| | | PAPRPRLRPEPCISLEPRPRPLPR |
| | AGER | EEVQLVVEPEGGAVAPGGTVTLTCEVPAQPSPQIHW |
| | | MKDGVPLPLPPSPVLILPEIGPQDQG |
| 2323 | KHSRP_0 | PPHAGGPPPHQYPPQGWGNTYPQWQPPAPHDPSKA |
| | | AAAAADPNAAWAAYYSHYYQQPPGPVP |
| 2324 | KHSRP_1 | QYPPQGWGNTYPQWQPPAPHDPSKAAAAAADPNA |
| | | AWAAYYSHYYQQPPGPVPGPAPAPAAPP |
| 2325 | KHSRP_2 | WAAYYSHYYQQPPGPVPGPAPAPAAPPAQGEPPQP |
| | | PPTGQSDYTKAWEEYYKKIGQQPQQPG |
| 2326 | ABLIM1 | FTAHRRATITHLLYLCPKDYCPRGRVCNSVDPFVAH |
| | | PQDPHHPSEKPVIHCHKCGEPCKGEV |
| | SIK3 | AAGAGTGGAGPAGRLLPPPAPGSPAAPAAVSPAAG |
| | | QPRPPAPASRGPMPARIGYYEIDRTIG |
| | TAF4B | GETSGAAICLPSVKPVVSSAGTTSDKPVIGTPVQIKL |
| | | AQPGPVLSQPAGIPQAVQVKQLVVQ |
| | AKNA | PIMPYPPAAVYYAPAGPTSAQPAAKWPPTASPPPAR |
| | | RHRHSIQLDLGDLEELNKALSRAVQA |
| | NUP62 | STAQPSGFNIGSAGNSAQPTAPATLPFTPATPAATTA |
| | | GATQPAAPTPTATITSTGPSLFASI |
| 2327 | LATS2 | HVAFRPDCPVPSRTNSFNSHQPRPGPPGKAEPSLPAP |
| | | NTVTAVTAAHILHPVKSVRVLRPEP |
| | ARHGAP33_0 | RAGGGGRDAPEAAAQSPCSVPSQVPTPGFFSPAPRE |
| | | CLPPFLGVPKPGLYPLGPPSFQPSSP |
| | ARHGAP33_1 | TRSWSPFRSMPPDRLNASYGMLGQSPPLHRSPDFLL |
| | | SYPPAPSCFPPDHLGYSAPQHPARRP |
| | ARHGAP33_2 | PARRPTPPEPLYVNLALGPRGPSPASSSSSSPPAHPRS |
| | | RSDPGPPVPRLPQKQRAPWGPRTP |
| 2328 | TEAD2_0 | PPWNVPDVKPFSQTPFTLSLTPPSTDLPGYEPPQALS |
| | | PLPPPTPSPPAWQARGLGTARLQLV |
| | TEAD2_1 | DVKPFSQTPFTLSLTPPSTDLPGYEPPQALSPLPPPTP |
| | | SPPAWQARGLGTARLQLVEFSAFV |
| | TP53BP1_0 | EEGGEPFQKKLQSGEPVELENPPLLPESTVSPQASTPI |
| | | SQSTPVFPPGSLPIPSQPQFSHDI |
| | TP53BP1_1 | PFQKKLQSGEPVELENPPLLPESTVSPQASTPISQSTP |
| | | VFPPGSLPIPSQPQFSHDIFIPSP |
| | PPP1R13B_0 | LERRKEGSLPRPSAGLPSRQRPTLLPATGSTPQPGSS |
| | | QQIQQRISVPPSPTYPPAGPPAFPA |
| | PPP1R13B_1 | PSESTEKEPEQDGPAAPADGSTVESLPRPLSPTKLTPI |
| | | VHSPLRYQSDADLEALRRKLANAP |
| | PPP1R13B_2 | EKEPEQDGPAAPADGSTVESLPRPLSPTKLTPIVHSP |
| | | LRYQSDADLEALRRKLANAPRPLKK |
| | PPP1R13B_3 | QDGPAAPADGSTVESLPRPLSPTKLTPIVHSPLRYQS |
| | | DADLEALRRKLANAPRPLKKRSSIT |
| | EML3_0 | QEMELVKAALAEALRLLRLQVPPSSLQGSGTPAPPG |
| | | DSLAAPPGLPPTCTPSLVSRGTQTET |
| | EML3_1 | SEGGGSSSSGAGSPGPPGILRPLQPPQRADTPRRNSS |
| | | SSSSPSERPRQKLSRKAISSANLLV |
| | ZDHHC8_0 | SLSYDSLLNPGSPGGHACPAHPAVGVAGYHSPYLHP |
| | | GATGDPPRPLPRSFSPVLGPRPREPS |
| 2329 | ZDHHC8_1 | GSPGGHACPAHPAVGVAGYHSPYLHPGATGDPPRP |
| | | LPRSFSPVLGPRPREPSPVRYDNLSRT |
| | HIF3A_0 | QLNASEQLPRAYHRPLGAVPRPRARSFHGLSPPALE |
| | | PSLLPRWGSDPRLSCSSPSRGDPSAS |
| 2330 | HIF3A_1 | EQLPRAYHRPLGAVPRPRARSFHGLSPPALEPSLLPR |
| | | WGSDPRLSCSSPSRGDPSASSPMAG |
| 2331 | HIF3A_2 | LFPLSLSFLLTGGPAPGSLQDPSTPLLNLNEPLGLGPS |
| | | LLSPYSDEDTTQPGGPFQPRAGSA |
| 2332 | HUS1 | ELLSMSSSSRIVTHDIPIKVIPRKLWKDLQEPVVPDP |
| | | DVSIYLPVLKTMKSVVEKMKNISNH |
| 2333 | ZNF385A_0 | NSQSQAEAHYKGNRHARRVKGIEAAKTRGREPGVR |
| | | EPGDPAPPGSTPTNGDGVAPRPVSMEN |
| 2334 | ZNF385A_1 | AEAHYKGNRHARRVKGIEAAKTRGREPGVREPGDP |
| | | APPGSTPTNGDGVAPRPVSMENGLGPA |
| | ZNF385A_2 | ARRVKGIEAAKTRGREPGVREPGDPAPPGSTPTNGD |
| | | GVAPRPVSMENGLGPAPGSPEKQPGS |
| 2335 | ZNF385A_3 | KGTKHKTILEARSGLGPIKAYPRLGPPTPGEPEAPAQ |
| | | DRTFHCEICNVKVNSEVQLKQHISS |
| | ZNF385A_4 | TFSKELPKSLAGGLLPSPLAVAAVMAAAAGSPLSLR |
| | | PAPAAPLLQGPPITHPLLHPAPGPIR |
| | VASN_0 | ATTTTATVPTTRPVVREPTALSSSLAPTWLSPTEPAT |
| | | EAPSPPSTAPPTVGPVPQPQDCPPS |
| | VASN_1 | TRPVVREPTALSSSLAPTWLSPTEPATEAPSPPSTAPP |
| | | TVGPVPQPQDCPPSTCLNGGTCHL |
| | MYRF_0 | CFPDISAPASSASYSHGQPAMPGSSGVHHLSPPGGGP |
| | | SPGRHGPLPPPGYGTPLNCNNNNGM |
| 2336 | MYRF_1 | YGTPLNCNNNNGMGAAPKPFPGGTGPPIKAEPKAP |
| | | YAPGTLPDSPPDSGSEAYSPQQVNEPH |
| | MYRF_2 | PTRAPSPPWPPQGPLSPGPGSLPLSIARVQTPPWHPP |
| | | GAPSPGLLQDSDSLSGSYLDPNYQS |
| | MAP2K7 | RRRIDLNLDISPQRPRPTLQLPLANDGGSRSPSSESSP |
| | | QHPTPPARPRHMLGLPSTLFTPRS |
| 2337 | BOP1 | PAYGRFIQERFERCLDLYLCPRQRKMRVNVDPEDLI |
| | | PKLPRPRDLQPFPTCQALVYRGHSDL |
| | RORC | VVKTPPAGAQGADTLTYTLGLPDGQLPLGSSPDLPE |
| | | ASACPPGLLKASGSGPSYSNNLAKAG |
| 2338 | TRERF1_0 | NPNPAASYSGATLYQSQLRSPRVLGDHLLLDPTHEL |
| | | PPYTPPPMLSPVRQGSGLFSNVLISG |
| | TRERF1_1 | SQLRSPRVLGDHLLLDPTHELPPYTPPPMLSPVRQGS |
| | | GLFSNVLISGHGPGAHPQLPLTPLT |
| | EIF4B | TSTTSSRNARRRESEKSLENETLNKEEDCHSPTSKPP |
| | | KPDQPLKVMPAPPPKENAWVKRSSN |
| | MAP7D1_0 | RAGASLARGPQPDRTHPSAAVPVCPRSASASPLTPC |
| | | SVTRSVHRCAPAGERGERRKPNAGGS |
| | MAP7D1_1 | GPEDKSQSKRRASNEKESAAPASPAPSPAPSPTPAPP |
| | | QKEQPPAETPTDAAVLTSPPAPAPP |
| | MAP7D1_2 | KESAAPASPAPSPAPSPTPAPPQKEQPPAETPTDAAV |
| | | LTSPPAPAPPVTPSKPMAGTTDREE |
| 2339 | MAP7D1_3 | EANANGSSPEPVKAVEARSPGLQKEAVQKEEPIPQE |
| | | PQWSLPSKELPASLVNGLQPLPAHQE |
| 2340 | MAP7D1_4 | GSSPEPVKAVEARSPGLQKEAVQKEEPIPQEPQWSL |
| | | PSKELPASLVNGLQPLPAHQENGFST |
| | RAB11FIP5_0 | ASPHHSSSGEEKAKSSWFGLREAKDPTQKPSPHPVK |
| | | PLSAAPVEGSPDRKQSRSSLSIALSS |
| | RAB11FIP5_1 | SWFGLREAKDPTQKPSPHPVKPLSAAPVEGSPDRKQ |
| | | SRSSLSIALSSGLEKLKTVTSGSIQP |
| | RAD54L2 | LSEPRMFAPFPSPVLPSNLSRGMSIYPGYMSPHAGYP |
| | | AGGLLRSQVPPFDSHEVAEVGFSSN |
| | LZTS2 | CPSGTLSDSGRNSLSSLPTYSTGGAEPTTSSPGGHLP |
| | | SHGSGRGALPGPARGVPTGPSHSDS |
| | SH3BP1_0 | SGSPGTPQALPRRLVGSSLRAPTVPPPLPPTPPQPAR |
| | | RQSRRSPASPSPASPGPASPSPVSL |
| | SH3BP1_1 | RLVGSSLRAPTVPPPLPPTPPQPARRQSRRSPASPSPA |
| | | SPGPASPSPVSLSNPAQVDLGAAT |
| | SH3BP1_2 | GSSLRAPTVPPPLPPTPPQPARRQSRRSPASPSPASPG |
| | | PASPSPVSLSNPAQVDLGAATAEG |
| | SH3BP1_3 | SLRAPTVPPPLPPTPPQPARRQSRRSPASPSPASPGPA |
| | | SPSPVSLSNPAQVDLGAATAEGGA |
| | SH3BP1_4 | LPPTPPQPARRQSRRSPASPSPASPGPASPSPVSLSNP |
| | | AQVDLGAATAEGGAPEAISGVPTP |
| 2341 | L3MBTL1_0 | FWIDADHPDIHPAGWCSKTGHPLQPPLGPREPSSASP |
| | | GGCPPLSYRSLPHTRTSKYSFHHRK |
| | L3MBTL1_1 | DHPDIHPAGWCSKTGHPLQPPLGPREPSSASPGGCPP |
| | | LSYRSLPHTRTSKYSFHHRKCPTPG |
| | NBEAL2_0 | ARQAGWQDVLTRLYVLEAATAGSPPPSSPESPTSPK |
| | | PAPPKPPTESPAEPSDVFLPSEAPCP |
| | NBEAL2_1 | AGWQDVLTRLYVLEAATAGSPPPSSPESPTSPKPAPP |
| | | KPPTESPAEPSDVFLPSEAPCPDPD |
| | NBEAL2_2 | LEAATAGSPPPSSPESPTSPKPAPPKPPTESPAEPSDV |
| | | FLPSEAPCPDPDGFYHALSPFCTP |
| 2342 | NBEAL2_3 | ATAGSPPPSSPESPTSPKPAPPKPPTESPAEPSDVFLPS |
| | | EAPCPDPDGFYHALSPFCTPFDL |
| | TP53 | EQWFTEDPGPDEAPRMPEAAPPVAPAPAAPTPAAPA |
| | | PAPSWPLSSSVPSQKTYQGSYGFRLG |
| | RGL3 | LSAKLAREKSSSPSGSPGDPSSPTSSVSPGSPPSSPRS |
| | | RDAPAGSPPASPGPQGPSTKLPLS |
| | PRG4_0 | TPKAETTTKGPALTTPKEPTPTTPKEPASTTPKEPTPT |
| | | TIKSAPTTPKEPAPTTTKSAPTTP |
| | PRG4_1 | TTTKGPALTTPKEPTPTTPKEPASTTPKEPTPTTIKSA |
| | | PTTPKEPAPTTTKSAPTTPKEPAP |
| | PRG4_2 | PKEPTPTTPKEPASTTPKEPTPTTIKSAPTTPKEPAPTT |
| | | TKSAPTTPKEPAPTTTKEPAPTT |
| | PRG4_3 | TPKEPTPTTIKSAPTTPKEPAPTTTKSAPTTPKEPAPT |
| | | TTKEPAPTTPKEPAPTTTKEPAPT |
| 2343 | PRG4_4 | PAPTTPKEPAPTTTKEPAPTTTKSAPTTPKEPAPTTPK |
| | | KPAPTTPKEPAPTTPKEPTPTTPK |
| 2344 | PRG4_5 | APTTPKEPAPTTPKKPAPTTPKEPAPTTPKEPTPTTPK |
| | | EPAPTTKEPAPTTPKEPAPTAPKK |
| | PRG4_6 | TTPKEPAPTTPKKPAPTTPKEPAPTTPKEPTPTTPKEP |
| | | APTTKEPAPTTPKEPAPTAPKKPA |
| | PRG4_7 | KEPAPTTPKKPAPTTPKEPAPTTPKEPTPTTPKEPAPT |
| | | TKEPAPTTPKEPAPTAPKKPAPTT |
| 2345 | PRG4_8 | PAPTTPKEPAPTTPKEPTPTTPKEPAPTTKEPAPTTPK |
| | | EPAPTAPKKPAPTTPKEPAPTTPK |
| | PRG4_9 | PKEPAPTTPKEPTPTTPKEPAPTTKEPAPTTPKEPAPT |
| | | APKKPAPTTPKEPAPTTPKEPAPT |
| 2346 | PRG4_10 | PAPTTPKEPTPTTPKEPAPTTKEPAPTTPKEPAPTAPK |
| | | KPAPTTPKEPAPTTPKEPAPTTTK |
| 2347 | PRG4_11 | APTTPKEPAPTTPKETAPTTPKGTAPTTLKEPAPTTP |
| | | KKPAPKELAPTTTKEPTSTTSDKPA |
| | PRG4_12 | KEPAPTTPKETAPTTPKGTAPTTLKEPAPTTPKKPAP |
| | | KELAPTTTKEPTSTTSDKPAPTTPK |
| 2348 | PRG4_13 | APTTPKEPAPTTPKEPAPTTPKGTAPTTLKEPAPTTP |
| | | KKPAPKELAPTTTKGPTSTTSDKPA |
| | PRG4_14 | KEPAPTTPKEPAPTTPKGTAPTTLKEPAPTTPKKPAP |
| | | KELAPTTTKGPTSTTSDKPAPTTPK |
| | NHS | AGLASPSSGYSSQSETPTSSFPTAFFSGPLSPGGSKRK |
| | | PKVPERKSSLQQPSLKDGTISLSK |
| | TNK2_0 | SAQTAEIFQALQQECMRQLQAPAGSPAPSPSPGGDD |
| | | KPQVPPRVPIPPRPTRPHVQLSPAPP |
| | TNK2_1 | PIPPRPTRPHVQLSPAPPGEEETSQWPGPASPPRVPPR |
| | | EPLSPQGSRTPSPLVPPGSSPLPP |
| | TNK2_2 | STHYYLLPERPSYLERYQRFLREAQSPEEPTPLPVPL |
| | | LLPPPSTPAPAAPTATVRPMPQAAL |
| | TNK2_3 | LERYQRFLREAQSPEEPTPLPVPLLLPPPSTPAPAAPT |
| | | ATVRPMPQAALDPKANFSTNNSNP |
| 2349 | KMT2D_0 | KGGHVTSMQPKEPGPLQCEAKPLGKAGVQLEPQLE |
| | | APLNEEMPLLPPPEESPLSPPPEESPT |
| | KMT2D_1 | KPLGKAGVQLEPQLEAPLNEEMPLLPPPEESPLSPPP |
| | | EESPTSPPPEASRLSPPPEELPASP |
| | KMT2D_2 | LEPQLEAPLNEEMPLLPPPEESPLSPPPEESPTSPPPEA |
| | | SRLSPPPEELPASPLPEALHLSR |
| | KMT2D_3 | PEASRLSPPPEELPASPLPEALHLSRPLEESPLSPPPEE |
| | | SPLSPPPESSPFSPLEESPLSPP |
| | KMT2D_4 | PESSPFSPLEESPLSPPEESPPSPALETPLSPPPEASPLS |
| | | PPFEESPLSPPPEELPTSPPPE |
| | KMT2D_5 | PPEESPPSPALETPLSPPPEASPLSPPFEESPLSPPPEEL |
| | | PTSPPPEASRLSPPPEESPMSP |
| | KMT2D_6 | FEESPLSPPPEELPTSPPPEASRLSPPPEESPMSPPPEES |
| | | PMSPPPEASRLFPPFEESPLSP |
| | KMT2D_7 | PEELPTSPPPEASRLSPPPEESPMSPPPEESPMSPPPEA |
| | | SRLFPPFEESPLSPPPEESPLSP |
| | KMT2D_8 | PEESPMSPPPEESPMSPPPEASRLFPPFEESPLSPPPEE |
| | | SPLSPPPEASRLSPPPEDSPMSP |
| | KMT2D_9 | PEESPMSPPPEASRLFPPFEESPLSPPPEESPLSPPPEAS |
| | | RLSPPPEDSPMSPPPEESPMSP |
| | KMT2D_10 | FEESPLSPPPEESPLSPPPEASRLSPPPEDSPMSPPPEES |
| | | PMSPPPEVSRLSPLPVVSRLSP |
| | KMT2D_11 | PEESPLSPPPEASRLSPPPEDSPMSPPPEESPMSPPPEV |
| | | SRLSPLPVVSRLSPPPEESPLSP |
| | KMT2D_12 | PEESPMSPPPEVSRLSPLPVVSRLSPPPEESPLSPPPEE |
| | | SPTSPPPEASRLSPPPEDSPTSP |
| | KMT2D_13 | PEVSRLSPLPVVSRLSPPPEESPLSPPPEESPTSPPPEA |
| | | SRLSPPPEDSPTSPPPEDSPASP |
| | KMT2D_14 | PEESPLSPPPEESPTSPPPEASRLSPPPEDSPTSPPPEDS |
| | | PASPPPEDSLMSLPLEESPLLP |
| | KMT2D_15 | PEESPTSPPPEASRLSPPPEDSPTSPPPEDSPASPPPEDS |
| | | LMSLPLEESPLLPLPEEPQLCP |
| | KMT2D_16 | PEDSPTSPPPEDSPASPPPEDSLMSLPLEESPLLPLPEE |
| | | PQLCPRSEGPHLSPRPEEPHLSP |
| | KMT2D_17 | GEPALSEPGEPPLSPLPEELPLSPSGEPSLSPQLMPPD |
| | | PLPPPLSPIITAAAPPALSPLGEL |
| 2350 | KMT2D_18 | GAKGDSDPESPLAAPILETPISPPPEANCTDPEPVPPM |
| | | ILPPSPGSPVGPASPILMEPLPPQ |
| | KMT2D_19 | ILETPISPPPEANCTDPEPVPPMILPPSPGSPVGPASPIL |
| | | MEPLPPQCSPLLQHSLVPQNSP |
| | KMT2D_20 | SPILMEPLPPQCSPLLQHSLVPQNSPPSQCSPPALPLS |
| | | VPSPLSPIGKVVGVSDEAELHEME |
| | KMT2D_21 | DTAPLDGIDAPGSQPEPGQTPGSLASELKGSPVLLDP |
| | | EELAPVTPMEVYPECKQTAGQGSPC |
| 2351 | KMT2D_22 | PGELFLKLPPQVPAQVPSQDPFGLAPAYPLEPRFPTA |
| | | PPTYPPYPSPTGAPAQPPMLGASSR |
| | KMT2D_23 | CALPPRSLPSDPFSRVPASPQSQSSSQSPLTPRPLSAE |
| | | AFCPSPVTPRFQSPDPYSRPPSRP |
| | KMT2D_24 | FSRVPASPQSQSSSQSPLTPRPLSAEAFCPSPVTPRFQ |
| | | SPDPYSRPPSRPQSRDPFAPLHKP |
| | KMT2D_25 | VPASPQSQSSSQSPLTPRPLSAEAFCPSPVTPRFQSPD |
| | | PYSRPPSRPQSRDPFAPLHKPPRP |
| | KMT2D_26 | QSQSSSQSPLTPRPLSAEAFCPSPVTPRFQSPDPYSRP |
| | | PSRPQSRDPFAPLHKPPRPQPPEV |
| | KMT2D_27 | SAEAFCPSPVTPRFQSPDPYSRPPSRPQSRDPFAPLHK |
| | | PPRPQPPEVAFKAGSLAHTSLGAG |
| | KMT2D_28 | GAGPRPQGPPRLPAPPGALSTGPVLGPVHPTPPPSSP |
| | | QEPKRPSQLPSPSSQLPTEAQLPPT |
| | KMT2D_29 | PQGPPRLPAPPGALSTGPVLGPVHPTPPPSSPQEPKRP |
| | | SQLPSPSSQLPTEAQLPPTHPGTP |
| | KMT2D_30 | ALSTGPVLGPVHPTPPPSSPQEPKRPSQLPSPSSQLPT |
| | | EAQLPPTHPGTPKPQGPTLEPPPG |
| | KMT2D_31 | YTYNVSNLDVRQLSAPPPEEPSPPPSPLAPSPASPPTE |
| | | PLVELPTEPLAEPPVPSPLPLASS |
| 2352 | KMT2D_32 | LDVRQLSAPPPEEPSPPPSPLAPSPASPPTEPLVELPTE |
| | | PLAEPPVPSPLPLASSPESARPK |
| | ARHGAP32 | RFYSGDQPPSYLGASVDKLHHPLEFADKSPTPPNLPS |
| | | DKIYPPSGSPEENTSTATMTYMTTT |
| | ZNF652_0 | EKPYPCDVCGQRFRFSNMLKAHKEKCFRVTSPVNV |
| | | PPAVQIPLTTSPATPVPSVVNTATTPT |
| | ZNF652_1 | SNMLKAHKEKCFRVTSPVNVPPAVQIPLTTSPATPV |
| | | PSVVNTATTPTPPINMNPVSTLPPRP |
| | TNS2_0 | SYGGAVPSYCPAYGRVPHSCGSPGEGRGYPSPGAHS |
| | | PRAGSISPGSPPYPQSRKLSYEIPTE |
| | TNS2_1 | ASSELSGPSTPLHTSSPVQGKESTRRQDTRSPTSAPT |
| | | QRLSPGEALPPVSQAGTGKAPELPS |
| 2353 | TNS2_2 | TQRLSPGEALPPVSQAGTGKAPELPSGSGPEPLAPSP |
| | | VSPTFPPSSPSDWPQERSPGGHSDG |
| | TNS2_3 | PGEALPPVSQAGTGKAPELPSGSGPEPLAPSPVSPTF |
| | | PPSSPSDWPQERSPGGHSDGASPRS |
| | TNS2_4 | ALPPVSQAGTGKAPELPSGSGPEPLAPSPVSPTFPPSS |
| | | PSDWPQERSPGGHSDGASPRSPVP |
| | TNS2_5 | SPRSPVPTTLPGLRHAPWQGPRGPPDSPDGSPLTPVP |
| | | SQMPWLVASPEPPQSSPTPAFPLAA |
| 2354 | TNS2_6 | EPYFGSLSALVSQHSISPISLPCCLRIPSKDPLEETPEA |
| | | PVPTNMSTAADLLRQGAACSVLY |
| | TNS2_7 | SLSALVSQHSISPISLPCCLRIPSKDPLEETPEAPVPTN |
| | | MSTAADLLRQGAACSVLYLTSVE |
| 2355 | COL11A2_0 | QRERPQNQQPHRAQRSPQQQPSRLHRPQNQEPQSQP |
| | | TESLYYDYEPPYYDVMTTGTTPDYQD |
| 2356 | COL11A2_1 | ETELGPALSAETAHSGAAAHGPRGLKGEKGEPAVL |
| | | EPGMLVEGPPGPEGPAGLIGPPGIQGN |
| 2357 | COL11A2_2 | PALSAETAHSGAAAHGPRGLKGEKGEPAVLEPGML |
| | | VEGPPGPEGPAGLIGPPGIQGNPGPVG |
| | ARHGAP27_0 | LPSPVWETHTDAGTGRPYYYNPDTGVTTWESPFEA |
| | | AEGAASPATSPASVDSHVSLETEWGQY |
| 2358 | ARHGAP27_1 | TGETAWEDEAENEPEEELEMQPGLSPGSPGDPRPPT |
| | | PETDYPESLTSYPEEDYSPVGSFGEP |
| | ARHGAP27_2 | WEDEAENEPEEELEMQPGLSPGSPGDPRPPTPETDY |
| | | PESLTSYPEEDYSPVGSFGEPGPTSP |
| | FOXL1 | RSAEAQPEAGSGAGGSGPAISRLQAAPAGPSPLLDG |
| | | PSPPAPLHWPGTASPNEDAGDAAQGA |
| | TMEM132E | GPGGGEDEARGAGPPGSALPAPEAPGPGTASPVVPP |
| | | TEDFLPLPTGFLQVPRGLTDLEIGMY |
| 2359 | BAIAP2 | RAVQLMQQVASNGATLPSALSASKSNLVISDPIPGA |
| | | KPLPVPPELAPFVGRMSAQESTPIMN |
| | SOS1 | DYLFNKSLEIEPRNPKPLPRFPKKYSYPLKSPGVRPS |
| | | NPRPGTMRHPTPLQQEPRKISYSRI |
| | CRAMP1 | PSPRPGPGLLLDVCTKDLADAPAEELQEKGSPAGPP |
| | | PSQGQPAARPPKEVPASRLAQQLREE |
| | PIAS1 | EEPSAKRTCPSLSPTSPLNNKGILSLPHQASPVSRTPS |
| | | LPAVDTSYINTSLIQDYRHPFHMT |
| | PPP1R15B_0 | AGDIPGNTQESTEEKIELLTTEVPLALEEESPSEGCPS |
| | | SEIPMEKEPGEGRISVVDYSYLEG |
| 2360 | PPP1R15B_1 | IELLTTEVPLALEEESPSEGCPSSEIPMEKEPGEGRISV |
| | | VDYSYLEGDLPISARPACSNKLI |
| | JPH2_0 | LQEILENSESLLEPPDRGAGAAGLPQPPRESPQLHER |
| | | ETPRPEGGSPSPAGTPPQPKRPRPG |
| 2361 | JPH2_1 | DQPEPEVSGSESAPSSPATAPLQAPTLRGPEPARETP |
| | | AKLEPKPIIPKAEPRAKARKTEARG |
| | JPH2_2 | EVSGSESAPSSPATAPLQAPTLRGPEPARETPAKLEP |
| | | KPIIPKAEPRAKARKTEARGLTKAG |
| 2362 | JPH2_3 | ESAPSSPATAPLQAPTLRGPEPARETPAKLEPKPIIPK |
| | | AEPRAKARKTEARGLTKAGAKKKA |
| | PPFIBP2 | EEPEGGFSKWNATNKDPEELFKQEMPPRCSSPTVGP |
| | | PPLPQKSLETRAQKKLSCSLEDLRSE |
| | LPP_0 | IDSLTSILADLECSSPYKPRPPQSSTGSTASPPVSTPVT |
| | | GHKRMVIPNQPPLTATKKSTLKP |
| | LPP_1 | SILADLECSSPYKPRPPQSSTGSTASPPVSTPVTGHKR |
| | | MVIPNQPPLTATKKSTLKPQPAPQ |
| 2363 | NSD1 | KQHREGMLFISKLDGRLSCTEHDPCGPNPLEPGEIRE |
| | | YVPPPVPLPPGPSTHLAEQSTGMAA |
| | PMEL | QAVPSGEGDAFELTVSCQGGLPKEACMEISSPGCQP |
| | | PAQRLCQPVLPSPACQLVLHQILKGG |
| 2364 | LRFN1 | AAGEATAPVEVCVVPLPLMAPPPAAPPPLTEPGSSDI |
| | | ATPGRPGANDSAAERRLVAAELTSN |
| 2365 | RAD21 | GVMLPEQPAHDDMDEDDNVSMGGPDSPDSVDPVE |
| | | PMPTMTDQTTLVPNEEEAFALEPIDITV |
| 2366 | PGM2L1 | TSFHGVGHDYVQLAFKVFGFKPPIPVPEQKDPDPDF |
| | | STVKCPNPEEGESVLELSLRLAEKEN |
| | ITSN2 | SIAMKLIKLKLQGQQLPVVLPPIMKQPPMFSPLISAR |
| | | FGMGSMPNLSIPQPLPPAAPITSLS |
| | CSTF2 | EVRGMEARGMDTRGPVPGPRGPIPSGMQGPSPINM |
| | | GAVVPQGSRQVPVMQGTGMQGASIQGG |
| 2367 | BCL9L_0 | GAASTGGGTGGTHPNTPTATTANNPLPPGGDPSSAP |
| | | GPALLGEAAAPGNGQRSLVGSEGLSK |
| | BCL9L_1 | LTISINQMGSPGMGHLKSPTLSQVHSPLVTSPSANLK |
| | | SPQTPSQMVPLPSANPPGPLKSPQV |
| | BCL9L_2 | PGMGHLKSPTLSQVHSPLVTSPSANLKSPQTPSQMV |
| | | PLPSANPPGPLKSPQVLGSSLSVRSP |
| 2368 | BCL9L_3 | NSQPSQMHLNSAAAQSPMGMNLPGQQPLSHEPPPA |
| | | MLPSPTPLGSNIPLHPNAQGTGGPPQN |
| 2369 | ZNF142_0 | YVPGDQAWQLRYASQEPEGAMQGPTPPPDSEPSNQ |
| | | LSARPEGPGHEPGTVVDPSLDQALPEM |
| | ZNF142_1 | SFKQQRGLSTHLLKKCPVLLRKNKGLPRPDSPIPLQP |
| | | VLPGTQASEDTESGKPPPASQEAEL |
| | MED13L_0 | LNTPQMNTPVTLNSAAPASNSGAGVLPSPATPRFSV |
| | | PTPRTPRTPRTPRGGGTASGQGSVKY |
| | MED13L_1 | TLNSAAPASNSGAGVLPSPATPRFSVPTPRTPRTPRT |
| | | PRGGGTASGQGSVKYDSTDQGSPAS |
| | MED13L_2 | LYAQVCRHHLAPYLATLQLDSSLLIPPKYQTPPAAA |
| | | QGQATPGNAGPLAPNGSAAPPAGSAF |
| | MED13L_3 | APYLATLQLDSSLLIPPKYQTPPAAAQGQATPGNAG |
| | | PLAPNGSAAPPAGSAFNPTSNSSSTN |
| | MASTL | PNQIKSGTPYRTPKSVRRGVAPVDDGRILGTPDYLA |
| | | PELLLGRAHGPAVDWWALGVCLFEFL |
| 2370 | SAMD11_0 | YRRLVSALSEASTFEDPQRLYHLGLPSHGEDPPWHD |
| | | PPHHLPSHDLLRVRQEVAAAALRGPS |
| | SAMD11_1 | QGLAQHREGAAPAAAPSFSERELPQPPPLLSPQNAP |
| | | HVALGPHLRPPFLGVPSALCQTPGYG |
| 2371 | FLYWCH1 | RRQREKLPSLALPEGLGEPQGPEGPGGRVEEPLEGV |
| | | GPWQCPEEPEPTPGLVLSKPALEEEE |
| | BCORL1 | APVPTPVLAPMPASTPPAAPAPPSVPMPTPTPSSGPP |
| | | STPTLIPAFAPTPVPAPTPAPIFTP |
| | SETD1B_0 | RTKLLFLREPDSDTELQMEGSPISSSSSQLSPLAPFGT |
| | | NSQPGFRGPTPPSSRPSSTGLEDI |
| 2372 | SETD1B_1 | LSPEPPAKEVEARPPLSPERAPEHDLEVEPEPPMMLP |
| | | LPLQPPLPPPRPPRPPSPPPEPETT |
| | SETD1B_2 | HDLEVEPEPPMMLPLPLQPPLPPPRPPRPPSPPPEPET |
| | | TDASHPSVPPEPLAEDHPPHTPGL |
| | SETD1B_3 | TEEYMELAKSRGPWRRPPKKRHEDLVPPAGSPELSP |
| | | PQPLFRPRSEFEEMTILYDIWNGGID |
| | ZCCHC8 | GSQSSESFQFQPPLPPDTPPLPRGTPPPVFTPPLPKGT |
| | | PPLTPSDSPQTRTASGAVDEDALT |
| | IKBKG | RKRHVEVSQAPLPPAPAYLSSPLALPSQRRSPPEEPP |
| | | DFCCPKCQYQAPDMDTLQIHVMECI |
| | LASIL | ARRGWRLFNCSASLDWPRMVESCLGSPCWASPQLL |
| | | RIIFKAMGQGLPDEEQEKLLRICSIYT |
| | PDZD4_0 | PEKSDKDSTSAYNTGESCRSTPLLVEPLPESPLRRAM |
| | | AGNSNLNRTPPGPAVATPAKAAPPP |
| | PDZD4_1 | LVEPLPESPLRRAMAGNSNLNRTPPGPAVATPAKAA |
| | | PPPGSPAKFRSLSRDPEAGRRQHAEE |
| | PDZD4_2 | RRAMAGNSNLNRTPPGPAVATPAKAAPPPGSPAKF |
| | | RSLSRDPEAGRRQHAEERGRRNPKTGL |
| | ZNF106 | SAASFEVVRQCPTAEKPEQEHTPNKMPSLKSPLLPC |
| | | PATKSLSQKQDPKNISKNTKTNFFSP |
| | HNF1A | EEAFRHKLAMDTYSGPPPGPGPGPALPAHSSPGLPPP |
| | | ALSPSKVHGVRYGQPATSETAEVPS |
| | CLASP2 | NTGNGTQSSMGSPLTRPTPRSPANWSSPLTSPTNTSQ |
| | | NTLSPSAFDYDTENMNSEDIYSSLR |
| | KMT2B_0 | PVVSARSSRVIKTPRRFMDEDPPKPPKVEVSPVLRPP |
| | | ITTSPPVPQEPAPVPSPPRAPTPPS |
| | KMT2B_1 | IKTPRRFMDEDPPKPPKVEVSPVLRPPITTSPPVPQEP |
| | | APVPSPPRAPTPPSTPVPLPEKRR |
| | KMT2B_2 | EVSPVLRPPITTSPPVPQEPAPVPSPPRAPTPPSTPVPL |
| | | PEKRRSILREPTFRWTSLTRELP |
| 2373 | FLNC | KYVITIRFGGEHIPNSPFHVLACDPLPHEEEPSEVPQL |
| | | RQPYAPPRPGARPTHWATEEPVVP |
| 2374 | CIC_0 | GMFVWTNVEPRSVAVFPWHSLVPFLAPSQPDPSVQ |
| | | PSEAQQPASHPVASNQSKEPAESAAVA |
| | CIC_1 | PLVSPPFSVPVQNGAQPPSKIIQLTPVPVSTPSGLVPP |
| | | LSPATLPGPTSQPQKVLLPSSTRI |
| | CIC_2 | PTAPESELEGQPTPPAPPPLPETWTPTARSSPPLPPPA |
| | | EERTSAKGPETMASKFPSSSSDWR |
| | CIC_3 | FQARYADIFPSKVCLQLKIREVRQKIMQAATPTEQPP |
| | | GAEAPLPVPPPTGTAAAPAPTPSPA |
| | DCTN1_0 | GPSGSASAGELSSSEPSTPAQTPLAAPIIPTPVLTSPG |
| | | AVPPLPSPSKEEEGLRAQVRDLEE |
| | DCTN1_1 | ASAGELSSSEPSTPAQTPLAAPIIPTPVLTSPGAVPPLP |
| | | SPSKEEEGLRAQVRDLEEKLETL |
| 2375 | EPN1_0 | PPAADPWGGPAPTPASGDPWRPAAPAGPSVDPWGG |
| | | TPAPAAGEGPTPDPWGSSDGGVPVSGP |
| | EPN1_1 | PWGGPAPTPASGDPWRPAAPAGPSVDPWGGTPAPA |
| | | AGEGPTPDPWGSSDGGVPVSGPSASDP |
| | EPN1_2 | SGDPWRPAAPAGPSVDPWGGTPAPAAGEGPTPDPW |
| | | GSSDGGVPVSGPSASDPWTPAPAFSDP |
| 2376 | EPN1_3 | TPAPAAGEGPTPDPWGSSDGGVPVSGPSASDPWTPA |
| | | PAFSDPWGGSPAKPSTNGTTAAGGFD |
| 2377 | EPN1_4 | TPDPWGSSDGGVPVSGPSASDPWTPAPAFSDPWGG |
| | | SPAKPSTNGTTAAGGFDTEPDEFSDFD |
| | EPN1_5 | GSSDGGVPVSGPSASDPWTPAPAFSDPWGGSPAKPS |
| | | TNGTTAAGGFDTEPDEFSDFDRLRTA |
| | EPN1_6 | EVPARSPGAFDMSGVRGSLAEAVGSPPPAATPTPTP |
| | | PTRKTPESFLGPNAALVDLDSLVSRP |
| | EPN1_7 | DMSGVRGSLAEAVGSPPPAATPTPTPPTRKTPESFLG |
| | | PNAALVDLDSLVSRPGPTPPGAKAS |
| | CEBPE | TAMHLPPTLAAPGQPLRVLKAPLATAAPPCSPLLKA |
| | | PSPAGPLHKGKKAVNKDSLEYRLRRE |
| 2378 | KCNH2 | SSPESSEDEGPGRSSSPLRLVPFSSPRPPGEPPGGEPL |
| | | MEDCEKSSDTCNPLSGAFSGVSNI |
| | RFX4 | MKGEGSTAEVREEIILTEAAAPTPSPVPSFSPAKSATS |
| | | VEVPPPSSPVSNPSPEYTGLSTTG |
| 2379 | LPIN3_0 | PSTSVAGGVDPLGLPIQQTEAGADLQPDTEDPTLVG |
| | | PPLHTPETEESKTQSSGDMGLPPASK |
| | LPIN3_1 | PLGLPIQQTEAGADLQPDTEDPTLVGPPLHTPETEES |
| | | KTQSSGDMGLPPASKSWSWATLEVP |
| 2380 | RYR1 | ELPPEPEPEPEPELEPEKADAENGEKEEVPEPTPEPPK |
| | | KQAPPSPPPKKEEAGGEFWGELEV |
| | RAPGEF1 | SQSTELLPDATDEEVAPPKPPLPGIRVVDNSPPPALPP |
| | | KKRQSAPSPTRVAVVAPMSRATSG |
| | SAMD4A | AYSSPSTTPEARRREPQAPRQPSLMGPESQSPDCKD |
| | | GAAATGATATPSAGASGGLQPHQLSS |
| 2381 | C1orf198 | YGPEWARLPPAQQDEIIDRCLVGPRAPAPRDPGDSE |
| | | ELTRFPGLRGPTGQKVVRFGDEDLTW |
| 2382 | MANIC1 | VVAEIAGHAPAREQEPPPNPAPAAPAPGEDDPSSWA |
| | | SPRRRKGGLRRTRPTGPREEATAARG |
| | MAST4_0 | NPQQREGSSPKHQDHTTDPKLLTCLGQNLHSPDLAR |
| | | PRCPLPPEASPSREKPGLRESSERGP |
| | MAST4_1 | TTDPKLLTCLGQNLHSPDLARPRCPLPPEASPSREKP |
| | | GLRESSERGPPTARSERSAARADTC |
| | PRRC2C | QTHKPVQNPLQTTSQSSKQPPPSIRLPSAQTPNGTDY |
| | | VASGKSIQTPQSHGTLTAELWDNKV |
| 2383 | USP36 | QNGCIPPKLPSGSPSPKLSQTPTHMPTILDDPGKKVK |
| | | KPAPPQHFSPRTAQGLPGTSNSNSS |
| | PROP1 | MEAERRRQAEKPKKGRVGSNLLPERHPATGTPTTT |
| | | VDSSAPPCRRLPGAGGGRSRFSPQGGQ |
| | ARMC5_0 | RAQGGSFRSLRSWLISEGYATGPDDISPDWSPEQCPP |
| | | EPMEPASPAPTPTSLRAPRTQRTPG |
| 2384 | ARMC5_1 | RSWLISEGYATGPDDISPDWSPEQCPPEPMEPASPAP |
| | | TPTSLRAPRTQRTPGRSPAAAIEEP |
| | ARMC5_2 | ADSLSCLQDLVSPTVSPAVPQAVPMDLDSPSPCLYE |
| | | PLLGPAPVPAPDLHFLLDSGLQLPAQ |
| 2385 | CHD8_0 | KRKKYTEDLDIKITDDEEEEEVDVTGPIKPEPILPEPV |
| | | QEPDGETLPSMQFFVENPSEEDAA |
| 2386 | CHD8_1 | TEDLDIKITDDEEEEEVDVTGPIKPEPILPEPVQEPDG |
| | | ETLPSMQFFVENPSEEDAAIVDKV |
| 2387 | COL6A1 | LKGEKGEPGADGEAGRPGSSGPSGDEGQPGEPGPPG |
| | | EKGEAGDEGNPGPDGAPGERGGPGER |
| | CRYBG1_0 | SSPTKRKGRSRALEAVPAPPASGPRAPAKESPPKRVP |
| | | DPSPVTKGTAAESGEEAARAIPREL |
| | CRYBG1_1 | PTTVDTKDLPPTAMPKPQHTFSDSQSPAESSPGPSLS |
| | | LSAPAPGDVPKDTCVQSPISSFPCT |
| | DLAT_0 | IIVEKEADISAFADYRPTEVTDLKPQVPPPTPPPVAA |
| | | VPPTPQPLAPTPSAPCPATPAGPKG |
| | DLAT_1 | AFADYRPTEVTDLKPQVPPPTPPPVAAVPPTPQPLAP |
| | | TPSAPCPATPAGPKGRVFVSPLAKK |
| | DLAT_2 | TEVTDLKPQVPPPTPPPVAAVPPTPQPLAPTPSAPCP |
| | | ATPAGPKGRVFVSPLAKKLAVEKGI |
| | DLAT_3 | QVPPPTPPPVAAVPPTPQPLAPTPSAPCPATPAGPKG |
| | | RVFVSPLAKKLAVEKGIDLTQVKGT |
| | DENND2B_0 | ACRYPSHSSSRVLLKDRHPPAPSPQNPQDPSPDTSPP |
| | | TCPFKTASFGYLDRSPSACKRDAQK |
| | DENND2B_1 | NPVPKPKRTFEYEADKNPKSKPSNGLPPSPTPAAPPP |
| | | LPSTPAPPVTRRPKKDMRGHRKSQS |
| | DENND2B_2 | EYEADKNPKSKPSNGLPPSPTPAAPPPLPSTPAPPVT |
| | | RRPKKDMRGHRKSQSRKSFEFEDAS |
| 2388 | KATNIP | LRLSAVPTSMGDMPSAPATSPPVKCPPVHEEPSLIQQ |
| | | LENLMGRKICEPPGKTPSWLQPSPT |
| | PCDH12 | CEVGQSHKDVDKEAMMEAGWDPCLQAPFHLTPTL |
| | | YRTLRNQGNQGAPAESREVLQDTVNLLF |
| | SCARF2_0 | HTVEHGSPRTRDPTPRPPGLPEEATALAAPSPPRARA |
| | | RGRGPGLLEPTDAGGPPRSAPEAAS |
| | SCARF2_1 | LGRAEVALGAQGPREKPAPPQKAKRSVPPASPARAP |
| | | PATETPGPEKAATDLPAPETPRKKTP |
| | SCARF2_2 | QGPREKPAPPQKAKRSVPPASPARAPPATETPGPEK |
| | | AATDLPAPETPRKKTPIQKPPRKKSR |
| 2389 | IRAG1_0 | SIFGADAAEVPGTRGHSQQEAAMPHIPEDEEPPGEP |
| | | QAAQSPAGQGPPAAGVSCSPTPTIVL |
| | IRAG1_1 | PGTRGHSQQEAAMPHIPEDEEPPGEPQAAQSPAGQG |
| | | PPAAGVSCSPTPTIVLTGDATSPEGE |
| 2390 | AMER1 | WETAQMYPRPNMNLGYHPTTSPGHHGYMLLDPVR |
| | | SYPGLAPGELLTPQSDQQESAPNSDEGY |
| | CAMSAP3_0 | SLASPYLPEGTSKPLSDRPTKAPVYMPHPETPSKPSP |
| | | CLVGEASKPPAPSEGSPKAVASSPA |
| | CAMSAP3_1 | YLPEGTSKPLSDRPTKAPVYMPHPETPSKPSPCLVGE |
| | | ASKPPAPSEGSPKAVASSPAATNSE |
| 2391 | PIK3C2A | ALPSIYPSTYSKQAAFQNGFNPRMPTFPSTEPIYLSLP |
| | | GQSPYFSYPLTPATPFHPQGSLPI |
| 2392 | SP110_0 | AEGSSLHTPLALPPPQPPQPSCSPCAPRVSEPGTSSQQ |
| | | SDEILSESPSPSDPVLPLPALIQE |
| | SP110_1 | QPPQPSCSPCAPRVSEPGTSSQQSDEILSESPSPSDPV |
| | | LPLPALIQEGRSTSVTNDKLTSKM |
| | SP110_2 | DNLIPQIRDKEDPQEMPHSPLGSMPEIRDNSPEPNDP |
| | | EEPQEVSSTPSDKKGKKRKRCIWST |
| | COL6A2 | QKGKLGRIGPPGCKGDPGNRGPDGYPGEAGSPGER |
| | | GDQGGKGDPGRPGRRGPPGEIGAKGSK |
| | POLRIG | TCASAPQGTLRILEGPQQSLSGSPLQPIPASPPPQIPPG |
| | | LRPRFCAFGGNPPVTGPRSALAP |
| | USP54 | CSSSSSLPVIHDPSVFLLGPQLYLPQPQFLSPDVLMPT |
| | | MAGEPNRLPGTSRSVQQFLAMCDR |
| | FILIP1L | HTPGQPLHIKVTPDHVQNTATLEITSPTTESPHSYTS |
| | | TAVIPNCGTPKQRITILQNASITPV |
| 2393 | BRPF1 | PIMSSLRQRKRGRSPRPSSSSDSDSDKSTEDPPMDLP |
| | | ANGFSGGNQPVKKSFLVYRNDCSLP |
| | LITAF | GPYQAATGPSSAPSAPPSYEETVAVNSYYPTPPAPM |
| | | PGPTTGLVTGPDGKGMNPPSYYTQPA |
| | GLIS3 | HNPSSQLPPLTAVDAGAERFAPSAPSPHHISPRRVPA |
| | | PSSILQRTQPPYTQQPSGSHLKSYQ |
| | CPLANE1 | ISQAYGLMNELLSESVQLPTLPQKPLPNKPSPTQSSS |
| | | CQHCPSPRGENQHGHSFLINRPGKV |
| | CNOT2_0 | ALGLPMRGMSNNTPQLNRSLSQGTQLPSHVTPTTG |
| | | VPTMSLHTPPSPSRGILPMNPRNMMNH |
| | CNOT2_1 | LTFIRAAETDPGMVHLALGSDLTTLGLNLNSPENLY |
| | | PKFASPWASSPCRPQDIDFHVPSEYL |
| | CNOT2_2 | PGMVHLALGSDLTTLGLNLNSPENLYPKFASPWASS |
| | | PCRPQDIDFHVPSEYLTNIHIRDKLA |
| | CNOT2_3 | LALGSDLTTLGLNLNSPENLYPKFASPWASSPCRPQ |
| | | DIDFHVPSEYLTNIHIRDKLAAIKLG |
| | USP19_0 | LRKRQSQRWGGLEAPAARVGGAKVAVPTGPTPLDS |
| | | TPPGGAPHPLTGQEEARAVEKDKSKAR |
| | USP19_1 | SQRWGGLEAPAARVGGAKVAVPTGPTPLDSTPPGG |
| | | APHPLTGQEEARAVEKDKSKARSEDTG |
| | CNTFR | EFTIVKPDPPENVVARPVPSNPRRLEVTWQTPSTWP |
| | | DPESFPLKFFLRYRPLILDQWQHVEL |
| | MYO19 | QARYMADTFYTNAGCTLVALNPFKPVPQLYSPELM |
| | | REYHAAPQPQKLKPHVFTVGEQTYRNV |
| | NR4A1 | YGSPCSAPSPSTPSFQPPQLSPWDGSFGHFSPSQTYE |
| | | GLRAWTEQLPKASGPPQPPAFFSFS |
| | FAT4 | RSKSPQAMASHGSRPGSRLKQPIGQIPLESSPPVGLSI |
| | | EEVERLNTPRPRNPSICSADHGRS |
| 2394 | CC2D1B_0 | QLASVRRGRKINEDEIPPPVALGKRPLAPQEPANRSP |
| | | ETDPPAPPALESDNPSQPETSLPGI |
| | CC2D1B_1 | RRGRKINEDEIPPPVALGKRPLAPQEPANRSPETDPP |
| | | APPALESDNPSQPETSLPGISAQPV |
| | GRB7_0 | LDLSPPHLSSSPEDLCPAPGTPPGTPRPPDTPLPEEVK |
| | | RSQPLLIPTTGRKLREEERRATSL |
| | GRB7_1 | LIPTTGRKLREEERRATSLPSIPNPFPELCSPPSQSPIL |
| | | GGPSSARGLLPRDASRPHVVKVY |
| | GRB7_2 | GRKLREEERRATSLPSIPNPFPELCSPPSQSPILGGPSS |
| | | ARGLLPRDASRPHVVKVYSEDGA |
| 2395 | CLGN | FEVLVDQTVVNKGSLLEDVVPPIKPPKEIEDPNDKK |
| | | PEEWDERAKIPDPSAVKPEDWDESEP |
| | STPG1 | PGYYNPSDCTKVPKKTLFPKNPILNFSAQPSPLPPKP |
| | | PFPGPGQYEIVDYLGPRKHFISSAS |
| | TCOF1 | NPAAARAPSAKGTISAPGKVVTAAAQAKQRSPSKV |
| | | KPPVRNPQNSTVLARGPASVPSVGKAV |
| 2396 | ELF2_0 | PCVSTPEFIHAAMRPDVITETVVEVSTEESEPMDTSPI |
| | | PTSPDSHEPMKKKKVGRKPKTQQS |
| | ELF2_1 | PEFIHAAMRPDVITETVVEVSTEESEPMDTSPIPTSPD |
| | | SHEPMKKKKVGRKPKTQQSPISNG |
| | ELF2_2 | AAMRPDVITETVVEVSTEESEPMDTSPIPTSPDSHEP |
| | | MKKKKVGRKPKTQQSPISNGSPELG |
| 2397 | ELF2_3 | DVITETVVEVSTEESEPMDTSPIPTSPDSHEPMKKKK |
| | | VGRKPKTQQSPISNGSPELGIKKKP |
| 2398 | CLIP1 | PLCTSTASMVSSSPSTPSNIPQKPSQPAAKEPSATPPIS |
| | | NLTKTASESISNLSEAGSIKKGE |
| | BRD4_0 | GRGRKETGTAKPGVSTVPNTTQASTPPQTQTPQPNP |
| | | PPVQATPHPFPAVTPDLIVQTPVMTV |
| | BRD4_1 | QATPHPFPAVTPDLIVQTPVMTVVPPQPLQTPPPVPP |
| | | QPQPPPAPAPQPVQSHPPIIAATPQ |
| | BRD4_2 | PQQPSRPSNRAAALPPKPARPPAVSPALTQTPLLPQP |
| | | PMAQPPQVLLEDEEPPAPPLTSMQM |
| 2399 | SEPTIN4 | ELSKFVKDFSGNASCHPPEAKTWASRPQVPEPRPQA |
| | | PDLYDDDLEFRPPSRPQSSDNQQYFC |
| 2400 | MAP3K9_0 | GQLNQRVGIFPSNYVTPRSAFSSRCQPGGEDPSCYPP |
| | | IQLLEIDFAELTLEEIIGIGGFGKV |
| | MAP3K9_1 | DGALKPETLLASRSPSSNGLSPSPGAGMLKTPSPSRD |
| | | PGEFPRLPDPNVVFPPTPRRWNTQQ |
| 2401 | MAP3K9_2 | SSNGLSPSPGAGMLKTPSPSRDPGEFPRLPDPNVVFP |
| | | PTPRRWNTQQDSTLERPKTLEFLPR |
| | CBFA2T2 | RREENSFDRDTIAPEPPAKRVCTISPAPRHSPALTVPL |
| | | MNPGGQFHPTPPPLQHYTLEDIAT |
| 2402 | MYPN_0 | IAQLHVRGNEDLSNNGSLHSANSTTNLAAIEPQPSPP |
| | | HSEPPSVEQPPKPKLEGVLVNHNEP |
| | MYPN_1 | SEASSEAGVVTTRQTRPDSFQERFNGQATKTPEPSSP |
| | | VKEPPPVLAKPKLDSTQLQQLHNQV |
| | MYPN_2 | LLVSHPSVQTKSPGGLSIQNEPLPPGPTEPTPPPFTFSI |
| | | PSGNQFQPRCVSPIPVSPTSRIQ |
| | PTCHD3 | SATGPQWYQESQESESEGKQPPPGPLAPPKSPEPSGP |
| | | LASEQDAPLPEGDDAPPRPSMLDDA |
| | KDM6B | PPAPPSSCHQNTSGSFRRPESPRPRVSFPKTPEVGPGP |
| | | PPGPLSKAPQPVPPGVGELPARGP |
| | C2CD5 | GESGLVVRAIGTACTLDKLSSPAAFLPACNSPSKEM |
| | | KEIPFNEDPNPNTHSSGPSTPLKNQT |
| | SEC16B | GTTTENTFYQDFSGCQGYSEAPGYRSALWLTPEQTC |
| | | LLQPSPQQPFPLQPGSYPAGGGAGQT |
| | ARAP1_0 | AHTSPAPAPRPTPRPVPMKRHIFRSPPVPATPPEPLPT |
| | | TTEDEGLPAAPPIPPRRSCLPPTC |
| 2403 | ARAP1_1 | GPPRLLVSLPTKEEESLLPSLSSPPQPQSEEPLSTLPQ |
| | | GPPQPPSPPPCPPEIPPKPVRLFP |
| | ARAP1_2 | NGGWHTSSLSLSLPSTIAAPHPMDGPPGGSTPVTPVI |
| | | KAGWLDKNPPQGSYIYQKRWVRLDT |
| | TRAPPC12 | EGDAGDLGRVRDEAEPGGEGDPGPEPAGTPSPSGEA |
| | | DGDCAPEDAAPSSGGAPRQDAAREVP |
| | ACACA | ADVNLPAAQLQIAMGIPLYRIKDIRMMYGVSPWGD |
| | | SPIDFEDSAHVPCPRGHVIAARITSEN |
| | UBP1_0 | EDAVEHEQKKSSKRTLPADYGDSLAKRGSCSPWPD |
| | | APTAYVNNSPSPAPTFTSPQQSTCSVP |
| | UBP1_1 | LPADYGDSLAKRGSCSPWPDAPTAYVNNSPSPAPTF |
| | | TSPQQSTCSVPDSNSSSPNHQGDGAS |
| | DENND1A | AWSGSTLPSRPATPNVATPFTPQFSFPPAGTPTPFPQP |
| | | PLNPFVPSMPAAPPTLPLVSTPAG |
| | FAM193A_0 | GIMDPPVTDDIHIHQLPLQVDPAPDYLAERSPPSVSS |
| | | ASSGSGSSSPITIQQHPRLILTDSG |
| | FAM193A_1 | SSEADDEEADGESSGEPPGAPKEDGVLGSRSPRTEES |
| | | KADSPPPSYPTQQAEQAPNTCECHV |
| | FAM193A_2 | LHLYPHIHGHVPLHTVPHLPRPLIHPTLYATPPFTHS |
| | | KALPPAPVQNHTNKHQVFNASLQDH |
| | FAM193A_3 | FHGISKEDHRHSAPAAPRNSPTGLAPLPALSPAALSP |
| | | AALSPASTPHLANLAAPSFPKTATT |
| | FAM193A_4 | HSAPAAPRNSPTGLAPLPALSPAALSPAALSPASTPH |
| | | LANLAAPSFPKTATTTPGFVDTRKS |
| | SCYL3 | LNQLVFAEPVAVKSFLPYLLGPKKDHAQGETPCLLS |
| | | PALFQSRVIPVLLQLFEVHEEHVRMV |
| 2404 | YY1AP1 | EEASRSAAATNPGSRLTRWPPPDKREGSAVDPGKR |
| | | RSLAATPSSSLPCTLIALGLRHEKEAN |
| 2405 | MGRN1 | PFKKSKPHPASLASKKPKRETNSDSVPPGYEPISLLE |
| | | ALNGLRAVSPAIPSAPLYEEITYSG |
| | QRICH1_0 | LTVHQPTEQPIQVQVQIQGQAPQSAAPSIQTPSLQSP |
| | | SPSQLQAAQIQVQHVQAAQQIQAAE |
| | QRICH1_1 | PTEQPIQVQVQIQGQAPQSAAPSIQTPSLQSPSPSQLQ |
| | | AAQIQVQHVQAAQQIQAAEIPEEH |
| | TFPT_0 | TIVLEDEGSQGTDAPTPGNAENEPPEKETLSPPRRTP |
| | | APPEPGSPAPGEGPSGRKRRRVPRD |
| | TFPT_1 | DEGSQGTDAPTPGNAENEPPEKETLSPPRRTPAPPEP |
| | | GSPAPGEGPSGRKRRRVPRDGRRAG |
| 2406 | TFPT_2 | GTDAPTPGNAENEPPEKETLSPPRRTPAPPEPGSPAP |
| | | GEGPSGRKRRRVPRDGRRAGNALTP |
| | CXXC1 | GGPNKIRQKCRLRQCQLRARESYKYFPSSLSPVTPSE |
| | | SLPRPRRPLPTQQQPQPSQKLGRIR |
| 2407 | MZF1 | RQRSNLLQHQRIHGDPPGPGAKPPAPPGAPEPPGPFP |
| | | CSECRESFARRAVLLEHQAVHTGDK |
| | GORASP1 | PSYHKKPPGTPPPSALPLGAPPPDALPPGPTPEDSPSL |
| | | ETGSRQSDYMEALLQAPGSSMEDP |
| 2408 | PRR14_0 | QRAEPMRIVRQPTPPPGDLEPPFQPSALPADPLESPPT |
| | | APDPALELPSTPPPSSLLRPRLSP |
| 2409 | PRR14_1 | QPTPPPGDLEPPFQPSALPADPLESPPTAPDPALELPS |
| | | TPPPSSLLRPRLSPWGLAPLFRSV |
| | PRR14_2 | DPLESPPTAPDPALELPSTPPPSSLLRPRLSPWGLAPL |
| | | FRSVRSKLESFADIFLTPNKTPQP |
| | CRYZL2P-SEC16B | GTTTENTFYQDFSGCQGYSEAPGYRSALWLTPEQTC |
| | | LLQPSPQQPFPLQPGSYPAGGGAGQT |
| | NTRK1 | PFGQASASIMAAFMDNPFEFNPEDPIPVSFSPVDTNS |
| | | TSGDPVEKKDETPFGVSVAVGLAVF |
| 2410 | DOK1 | KPLYWDLYEHAQQQLLKAKLTDPKEDPIYDEPEGL |
| | | APVPPQGLYDLPREPKDAWWCQARVKE |
| | HMGXB3 | PGADVPTPSEGTSTSSPLPAPKKPTGADLLTPGSRAP |
| | | ELKGRARGKPSLLAAARPMRAILPA |
| | HMX2 | KAPACFCPDQHGPKEQGPKHHPPIPFPCLGTPKGSG |
| | | GSGPGGLERTPFLSPSHSDFKEEKER |
| 2411 | THADA | CNMGEKFLLLAMKENHPECFCKILKILHCMDPGEW |
| | | LPQTEHCVHLTPKEFLIWTMDIASNER |
| | MGA | KPLILSRKKDQATENTSPLNTPHTSANLVMTPQGQL |
| | | LTLKGPLFSGPVVAVSPDLLESDLKP |
| | FBF1 | LFPASPTREAHRESSVPVTPSVPPPASQHSTPAGLPPS |
| | | RAKPPTEGAGSPAKASQASKLRAS |
| | SULT1A1 | KCHRAPIFMRVPFLEFKAPGIPSGMETLKDTPAPRLL |
| | | KTHLPLALLPQTLLDQKVKVVYVAR |
| | KAT14 | SSSDRTPLTSPSPSPSLDFSAPGTPASHSATPSLLSEA |
| | | DLIPDVMPPQALFHDDDEMEGDGV |
| | ELK1_0 | PERTPGSGSGSGLQAPGPALTPSLLPTHTLTPVLLTPS |
| | | SLPPSIHFWSTLSPIAPRSPAKLS |
| | ELK1_1 | GSGSGSGLQAPGPALTPSLLPTHTLTPVLLTPSSLPPS |
| | | IHFWSTLSPIAPRSPAKLSFQFPS |
| | DAG1_0 | IHATPTPVTAIGPPTTAIQEPPSRIVPTPTSPAIAPPTET |
| | | MAPPVRDPVPGKPTVTIRTRGA |
| 2412 | DAG1_1 | LGPIQPTRVSEAGTTVPGQIRPTMTIPGYVEPTAVAT |
| | | PPTTTTKKPRVSTPKPATPSTDSTT |
| 2413 | PASK | EHYAASDRESPGHVPSTLDAGPEDTCPSAEEPRLNV |
| | | QVTSTPVIVMRGAAGLQREIQEGAYS |
| 2414 | MOV10 | CMEPESLVAIAGLMEVKETGDPGGQLVLAGDPRQL |
| | | GPVLRSPLTQKHGLGYSLLERLLTYNS |
| | GLIS1 | PLDATTSSHHHLSPLPMAESTRDGLGPGLLSPIVSPL |
| | | KGLGPPPLPPSSQSHSPGGQPFPTL |
| | PRDM2 | SSASPHPCPSPLSNATAQSPLPILSPTVSPSPSPIPPVEP |
| | | LMSAASPGPPTLSSSSSSSSSS |
| | POU2F2_0 | WFCNRRQKEKRINPCSAAPMLPSPGKPASYSPHMV |
| | | TPQGGAGTLPLSQASSSLSTTVTTLSS |
| | POU2F2_1 | RQKEKRINPCSAAPMLPSPGKPASYSPHMVTPQGGA |
| | | GTLPLSQASSSLSTTVTTLSSAVGTL |
| | FOXN1_0 | KHAGFSCSSFVSDGPPERTPSLPPHSPRIASPGPEQVQ |
| | | GHCPAGPGPGPFRLSPSDKYPGFG |
| | FOXN1_1 | APGPIPGKNPLQDLLMGHTPSCYGQTYLHLSPGLAP |
| | | PGPPQPLFPQPDGHLELRAQPGTPQD |
| | RIMS1 | DVELESESVSEKGDLDYYWLDPATWHSRETSPISSH |
| | | PVTWQPSKEGDRLIGRVILNKRTTMP |
| | MED12L | LYHTHPMPKPRSYYLQPLPLPPEEEEEEPTSPVSQEP |
| | | ERKSAELSDQGKTTTDEEKKTKGRK |
| | REPIN1 | HKRSEGSAQAAPGPGSPQLPAGPQESAAEPTPAVPL |
| | | KPAQEPPPGAPPEHPQDPIEAPPSLY |
| 2415 | WNK2_0 | AYQQPTAAPGLPVGSVPAPACPPSLQQHFPDPAMSF |
| | | APVLPPPSTPMPTGPGQPAPPGQQPP |
| | WNK2_1 | SVPAPACPPSLQQHFPDPAMSFAPVLPPPSTPMPTGP |
| | | GQPAPPGQQPPPLAQPTPLPQVLAP |
| | WNK2_2 | TPLAGIDGLPPALPDLPTATVPPVPPPQYFSPAVILPS |
| | | LAAPLPPASPALPLQAVKLPHPPG |
| 2416 | WNK2_3 | TRPPQPVLPPQPMLPPQPVLPPQPALPVRPEPLQPHL |
| | | PEQAAPAATPGSQILLGHPAPYAVD |
| | WNK2_4 | VSASVQSVPTQTATLLPPANPPLPGGPGIASPCPTVQ |
| | | LTVEPVQEEQASQDKPPGLPQSCES |
| 2417 | WNK2_5 | QTATLLPPANPPLPGGPGIASPCPTVQLTVEPVQEEQ |
| | | ASQDKPPGLPQSCESYGGSDVTSGK |
| 2418 | WNK2_6 | DRDGRQVASDSHVVPSVPQDVPAFVRPARVEPTDR |
| | | DGGEAGESSAEPPPSDMGTVGGQASHP |
| 2419 | ZFR2_0 | EERMRKQRHLAEERLEQLRRWHAERRRLEEEPPQD |
| | | VPPHAPPDWAQPLLMGRPESPASAPLQ |
| 2420 | ZFR2_1 | ANIVISSCEEPRMQVTISVTSPLMREDPSTDPGVEEP |
| | | QADAGDVLSPKKCLESLAALRHARW |
| 2421 | ZFR2_2 | SSCEEPRMQVTISVTSPLMREDPSTDPGVEEPQADA |
| | | GDVLSPKKCLESLAALRHARWFQARA |
| | GTF3C2_0 | TPMPKKRGRKSKAELLLLKLSKDLDRPESQSPKRPP |
| | | EDFETPSGERPRRRAAQVALLYLQEL |
| | GTF3C2_1 | SKAELLLLKLSKDLDRPESQSPKRPPEDFETPSGERP |
| | | RRRAAQVALLYLQELAEELSTALPA |
| | BTBD18 | TQDSPQIPDPGGDFQEPSGTQPFSSNEQEMSPTRTEL |
| | | CQDSPMCTKLQDILVSASHSPDHPV |
| 2422 | SPOCD1 | SCGDNIFQKALSQTPMPAPEMPKTRELSPTEPQDRV |
| | | PPSGLHVPAAPTKALPCLPPWEGVLD |
| | STXBP5 | TEVIPMLEVRLLYEINDVETPEGEQPPPLPTPVGGSN |
| | | PQPIPPQSHPSTSSSSSDGLRDNVP |
| | CNOT1_0 | CSNVMNKARQPPPGVMPKGRPPSASSLDAISPVQID |
| | | PLAGMTSLSIGGSAAPHTQSMQGFPP |
| 2423 | CNOT1_1 | NKARQPPPGVMPKGRPPSASSLDAISPVQIDPLAGM |
| | | TSLSIGGSAAPHTQSMQGFPPNLGSA |
| 2424 | CNOT4_0 | CGYQICRFCWHRIRTDENGLCPACRKPYPEDPAVYK |
| | | PLSQEELQRIKNEKKQKQNERKQKIS |
| | CNOT4_1 | EGAVTESQSLFSDNFRHPNPIPSGLPPFPSSPQTSSDW |
| | | PTAPEPQSLFTSETIPVSSSTDWQ |
| 2425 | CNOT4_2 | DNFRHPNPIPSGLPPFPSSPQTSSDWPTAPEPQSLFTS |
| | | ETIPVSSSTDWQAAFGFGSSKQPE |
| | FETUB | SQAPATGSENSAVNQKPTNLPKVEESQQKNTPPTDS |
| | | PSKAGPRGSVQYLPDLDDKNSQEKGP |
| | BCL11A_0 | AMEPPAMDFSRRLRELAGNTSSPPLSPGRPSPMQRL |
| | | LQPFQPGSKPPFLATPPLPPLQSAPP |
| | BCL11A_1 | SSPPLSPGRPSPMQRLLQPFQPGSKPPFLATPPLPPLQ |
| | | SAPPPSQPPVKSKSCEFCGKTFKF |
| 2426 | KDM3B_0 | LKGDRGEVDSNGSDGGEASRGPWKGGNASGEPGL |
| | | DQRAKQPPSTFVPQINRNIRFATYTKEN |
| | KDM3B_1 | GPSLSAMGNGRSSSPTSSLTQPIEMPTLSSSPTEERPT |
| | | VGPGQQDNPLLKTFSNVFGRHSGG |
| 2427 | BAHD1_0 | ENVAGPRSADEADELPPDLPKPPSPAPSSEDPGLAQP |
| | | RKRRLASLNAEALNNLLLEREDTSS |
| 2428 | BAHD1_1 | LEFPLPEAGHPASPAHPLLGCPVPSVPPAAEPVPHLQ |
| | | TPTSEPQTVARACPQSAKPPSGSKS |
| 2429 | PNPLA2 | LLLGLFCTNVAFPPEALRMRAPADPAPAPADPASPQ |
| | | HQLAGPAPLLSTPAPEARPVIGALGL |
| | RBM10 | SQSYTIMSPAVLKSELQSPTHPSSALPPATSPTAQES |
| | | YSQYPVPDVSTYQYDETSGYYYDPQ |
| | KIF20A | KKRLGTNQENQQPNQQPPGKKPFLRNLLPRTPTCQS |
| | | STDCSPYARILRSRRSPLLKSGPFGK |
| 2430 | OSGIN1 | KVFGVSLVLVLIGSHPDLSFLPGAGADFAVDPDQPL |
| | | SAKRNPIDVDPFTYQSTRQEGLYAMG |
| | DGKZ_0 | YVTEIAQDEIYILDPELLGASARPDLPTPTSPLPTSPC |
| | | SPTPRSLQGDAAPPQGEELIEAAK |
| | DGKZ_1 | AQDEIYILDPELLGASARPDLPTPTSPLPTSPCSPTPRS |
| | | LQGDAAPPQGEELIEAAKRNDFC |
| | DGKZ_2 | YILDPELLGASARPDLPTPTSPLPTSPCSPTPRSLQGD |
| | | AAPPQGEELIEAAKRNDFCKLQEL |
| | FOXF2 | PVPSSPAMASAIECHSPYTSPAAHWSSPGASPYLKQP |
| | | PALTPSSNPAASAGLHSSMSSYSLE |
| | HSPG2 | NKVGSAEAFAQLLVQGPPGSLPATSIPAGSTPTVQV |
| | | TPQLETKSIGASVEFHCAVPSDRGTQ |
| 2431 | MIA3_0 | ERAIAEEKREAANLRHKLLELTQKMAMLQEEPVIV |
| | | KPMPGKPNTQNPPRRGPLSQNGSFGPS |
| | MIA3_1 | GSSPTRVLDEGKVNMAPKGPPPFPGVPLMSTPMGG |
| | | PVPPPIRYGPPPQLCGPFGPRPLPPPF |
| | CREB3L2_0 | PTPPSSHGSDSEGSLSPNPRLHPFSLPQTHSPSRAAPR |
| | | APSALSSSPLLTAPHKLQGSGPLV |
| | CREB3L2_1 | SPNPRLHPFSLPQTHSPSRAAPRAPSALSSSPLLTAPH |
| | | KLQGSGPLVLTEEEKRTLIAEGYP |
| | NFATC1_0 | PQRSTLMPAAPGVSPKLHDLSPAAYTKGVASPGHC |
| | | HLGLPQPAGEAPAVQDVPRPVATHPGS |
| | NFATC1_1 | PGHCHLGLPQPAGEAPAVQDVPRPVATHPGSPGQPP |
| | | PALLPQQVSAPPSSSCPPGLEHSLCP |
| | PDE5A | PVCKEGIRGHTESCSCPLQQSPRADNSAPGTPTRKIS |
| | | ASEFDRPLRPIVVKDSEGTVSFLSD |
| | PRDM15 | ELRVWYAAFYAKKMDKPMLKQAGSGVHAAGTPE |
| | | NSAPVESEPSQWACKVCSATFLELQLLNE |
| | MYBL2_0 | VTTPLHRDKTPLHQKHAAFVTPDQKYSMDNTPHTP |
| | | TPFKNALEKYGPLKPLPQTPHLEEDLK |
| | MYBL2_1 | HRDKTPLHQKHAAFVTPDQKYSMDNTPHTPTPFKN |
| | | ALEKYGPLKPLPQTPHLEEDLKEVLRS |
| | ZYX | YVPPPVATPFSSKSSTKPAAGGTAPLPPWKSPSSSQP |
| | | LPQVPAPAQSQTQFHVQPQPQPKPQ |
| | FCMR | ARGADAAGTGEAPVPGPGAPLPPAPLQVSESPWLH |
| | | APSLKTSCEYVSLYHQPAAMMEDSDSD |
| | ATG12_0 | MAEEPQSVLQLPTSIAAGGEGLTDVSPETTTPEPPSS |
| | | AAVSPGTEEPAGDTKKKIDILLKAV |
| | ATG12_1 | LPTSIAAGGEGLTDVSPETTTPEPPSSAAVSPGTEEPA |
| | | GDTKKKIDILLKAVGDTPIMKTKK |
| 2432 | DMRT3 | QLRSQYVSPFPSNSTSVFRSSPVLPARATEDPRISIPD |
| | | DGCPFVSKQSIYTEDDYDERSDSS |
| | DLGAP2 | LCSGHTCGLAPPEDCEHLHHGPDARPPYLLSPADSC |
| | | PGGRHRCSPRSSVHSECVMMPVVLGD |
| | DNM3_0 | LGIIGDISTATVSTPAPPPVDDSWIQHSRRSPPPSPTT |
| | | QRRPTLSAPLARPTSGRGPAPAIP |
| | DNM3_1 | PPSPTTQRRPTLSAPLARPTSGRGPAPAIPSPGPHSGA |
| | | PPVPFRPGPLPPFPSSSDSFGAPP |
| | KLF16 | LAASILADLRGGPGAAPGGASPASSSSAASSPSSGRA |
| | | PGAAPSAAAKSHRCPFPDCAKAYYK |
| | WNT6 | TQACSMGELLQCGCQAPRGRAPPRPSGLPGTPGPPG |
| | | PAGSPEGSAAWEWGGCGDDVDFGDEK |
| | MUC16_0 | MTYTEKSEVSSSIHPRPETSAPGAETTLTSTPGNRAIS |
| | | LTLPFSSIPVEEVISTGITSGPDI |
| | MUC16_1 | RGPGDMSWQSSPSLENPSSLPSLLSLPATTSPPPISST |
| | | LPVTISSSPLPVTSLLTSSPVTTT |
| | MUC16_2 | PEDVSWPSPLSVEKNSPPSSLVSSSSVTSPSPLYSTPS |
| | | GSSHSSPVPVTSLFTSIMMKATDM |
| 2423 | KCNQ1 | APGPAPPASPAAPAAPPVASDLGPRPPVSLDPRVSIY |
| | | STRRPVLARTHVQGRVYNFLERPTG |
| 2424 | BCAR1_0 | PSVSKDVPDGPLLREETYDVPPAFAKAKPFDPARTP |
| | | LVLAAPPPDSPPAEDVYDVPPPAPDL |
| | BCAR1_1 | ETYDVPPAFAKAKPFDPARTPLVLAAPPPDSPPAED |
| | | VYDVPPPAPDLYDVPPGLRRPGPGTL |
| | FOXO4 | APGPSSLVPTLSMIAPPPVMASAPIPKALGTPVLTPPT |
| | | EAASQDRMPQDLDLDMYMENLECD |
| | AKTIS1 | RCLHDIALAHRAATAARPPAPPPAPQPPSPTPSPPRP |
| | | TLAREDNEEDEDEPTETETSGEQLG |
| 2425 | COL5A2_0 | SVGPVGPRGPQGLQGQQGGAGPTGPPGEPGDPGPM |
| | | GPIGSRGPEGPPGKPGEDGEPGRNGNP |
| | COL5A2_1 | AIGTDGTPGAKGPTGSPGTSGPPGSAGPPGSPGPQGS |
| | | TGPQGIRGQPGDPGVPGFKGEAGPK |
| 2426 | COL5A2_2 | PPGPTGFQGLPGPPGPPGEGGKPGDQGVPGDPGAVG |
| | | PLGPRGERGNPGERGEPGITGLPGEK |
| 2427 | COL5A2_3 | TPGKVGPTGATGDKGPPGPVGPPGSNGPVGEPGPEG |
| | | PAGNDGTPGRDGAVGERGDRGDPGPA |
| | CTC1_0 | SYLPPARWNSSGEGHLELWDAPVPVFPLTISPGPVTP |
| | | IPVLYPESASCLLRLRNKLRGVQRN |
| | CTC1_1 | ARWNSSGEGHLELWDAPVPVFPLTISPGPVTPIPVLY |
| | | PESASCLLRLRNKLRGVQRNLAGSL |
| | SH2D6 | PLSLAPAHLPGTEEDSLYLDHSGPLGPSKPSPPLPQP |
| | | TMLKGAVSLPVAGKQGPIFGRREQG |
| | KSR1 | DSSSNPSSTTSSTPSSPAPFPTSSNPSSATTPPNPSPGQ |
| | | RDSRFNFPAAYFIHHRQQFIFPV |
| | Clorf127_0 | AAPVLWTVESFFQCVGSGTESPASTAALRTTPSPPSP |
| | | GPETPPAGVPPAASSQVWAAGPAAQ |
| | Clorf127_1 | WTVESFFQCVGSGTESPASTAALRTTPSPPSPGPETP |
| | | PAGVPPAASSQVWAAGPAAQEWLSR |
| | Clorf127_2 | FFQCVGSGTESPASTAALRTTPSPPSPGPETPPAGVPP |
| | | AASSQVWAAGPAAQEWLSRDLLHR |
| | Clorf127_3 | QTSASILPRVVQAQRGPQPPPGEAGIPGHPTPPATLP |
| | | SEPVEGVQASPWRPRPVLPTHPALT |
| | Clorf127_4 | GVQASPWRPRPVLPTHPALTLPVSSDASSPSPPAPRP |
| | | ERPESLLVSGPSVTLTEGLGTVRPE |
| | Clorf127_5 | GHMDLSSSEPSQDIEGPGLSILPARDATFSTPSVRQP |
| | | DPSAWLSSGPELTGMPRVRLAAPLA |
| | C2CD4D_0 | AEPAARWAPSGLFSKRRAPGPPTSACPNVLTPDRIP |
| | | QFFIPPRLPDPGGAVPAARRHVAGRG |
| 2428 | C2CD4D_1 | RRAPGPPTSACPNVLTPDRIPQFFIPPRLPDPGGAVPA |
| | | ARRHVAGRGLPATCSLPHLAGREG |
| | C2CD4D_2 | SDTASSPDSSPFGSPRPGLGRRRVSRPHSLSPEKASS |
| | | ADTSPHSPRRAGPPTPPLFHLDFLC |
| 2429 | MESP1 | GLGLVSAVRAGASWGSPPACPGARAAPEPRDPPAL |
| | | FAEAACPEGQAMEPSPPSPLLPGDVLA |
| 2430 | PCF11 | DPAWPIKPLPPNVNTSSIHVNPKFLNKSPEEPSTPGT |
| | | VVSSPSISTPPIVPDIQKNLTQEQL |
| | LHX6 | TLQKLADMTGLSRRVIQVWFQNCRARHKKHTPQHP |
| | | VPPSGAPPSRLPSALSDDIHYTPFSSP |
| | FRMD1 | MAVPPRGRGIDPARTNPDTFPPSGARCMEPSPERPA |
| | | CSQQEPTLGMDAMASEHRDVLVLLPS |
| 2431 | SPHK2_0 | GSARFTLGTVLGLATLHTYRGRLSYLPATVEPASPT |
| | | PAHSLPRAKSELTLTPDPAPPMAHSP |
| | SPHK2_1 | TLGTVLGLATLHTYRGRLSYLPATVEPASPTPAHSL |
| | | PRAKSELTLTPDPAPPMAHSPLHRSV |
| | SPHK2_2 | GRLSYLPATVEPASPTPAHSLPRAKSELTLTPDPAPP |
| | | MAHSPLHRSVSDLPLPLPQPALASP |
| | SPHK2_3 | EPASPTPAHSLPRAKSELTLTPDPAPPMAHSPLHRSV |
| | | SDLPLPLPQPALASPGSPEPLPILS |
| | SPHK2_4 | AGDWGGAGDAPLSPDPLLSSPPGSPKAALHSPVSEG |
| | | APVIPPSSGLPLPTPDARVGASTCGP |
| | LACTB | GAAPAQSPAAPDPEASPLAEPPQEQSLAPWSPQTPA |
| | | PPCSRCFARAIESSRDLLHRIKDEVG |
| | SMAD2 | YISEDGETSDQQLNQSMDTGSPAELSPTTLSPVNHSL |
| | | DLQPVTYSEPAFWCSIAYYELNQRV |
| | TET3_0 | AKEKNISLQTAIAIEALTQLSSALPQPSHSTPQASCPL |
| | | PEALSPPAPFRSPQSYLRAPSWPV |
| | TET3_1 | KRSLFLEQVHDTSFPAPSEPSAPGWWPPPSSPVPRLP |
| | | DRPPKEKKKKLPTPAGGPVGTEKAA |
| 2432 | COL1A1_0 | VPGPMGPSGPRGLPGPPGAPGPQGFQGPPGEPGEPG |
| | | ASGPMGPRGPPGPPGKNGDDGEAGKP |
| 2433 | COL1A1_1 | PMGPSGPRGLPGPPGAPGPQGFQGPPGEPGEPGASG |
| | | PMGPRGPPGPPGKNGDDGEAGKPGRP |
| | COL1A1_2 | PPGERGGPGSRGFPGADGVAGPKGPAGERGSPGPA |
| | | GPKGSPGEAGRPGEAGLPGAKGLTGSP |
| | PER1_0 | RDFTQEKSVFCRIRGGPDRDPGPRYQPFRLTPYVTKI |
| | | RVSDGAPAQPCCLLIAERIHSGYEA |
| | PER1_1 | HQNPRAEAPCYVSHPSPVPPSTPWPTPPATTPFPAVV |
| | | QPYPLPVFSPRGGPQPLPPAPTSVP |
| | PER1_2 | LPNYLFPTPSSYPYGALQTPAEGPPTPASHSPSPSLPA |
| | | LAPSPPHRPDSPLFNSRCSSPLQL |
| | CARMIL1 | ENRFGLGTPEKNTKAEPKAEAGSRSRSSSSTPTSPKP |
| | | LLQSPKPSLAARPVIPQKPRTASRP |
| 2434 | WNT10A | PEFRTVGALLRSRFHRATLIRPHNRNGGQLEPGPAG |
| | | APSPAPGAPGPRRRASPADLVYFEKS |
| | CDCA8 | VGRLEVSMVKPTPGLTPRFDSRVFKTPGLRTPAAGE |
| | | RIYNISGNGSPLADSKEIFLTVPVGG |
| | AMPH_0 | AFTIQGAPSDSGPLRIAKTPSPPEEPSPLPSPTASPNHT |
| | | LAPASPAPARPRSPSQTRKGPPV |
| | AMPH_1 | LRIAKTPSPPEEPSPLPSPTASPNHTLAPASPAPARPR |
| | | SPSQTRKGPPVPPLPKVTPTKELQ |
| | POGZ_0 | QKKGKSLDSEPSVPSAAKPPSPEKTAPVASTPSSTPIP |
| | | ALSPPTKVPEPNENVGDAVQTKLI |
| | POGZ_1 | PSVPSAAKPPSPEKTAPVASTPSSTPIPALSPPTKVPEP |
| | | NENVGDAVQTKLIMLVDDFYYGR |
| | POGZ_2 | AGATPAEPEELLTPLAPALPSPASTATPPPTPTHPQA |
| | | LALPPLATEGAECLNVDDQDEGSPV |
| | NRIP1 | YARTSVIESPSTNRTTPVSTPPLLTSSKAGSPINLSQH |
| | | SLVIKWNSPPYVCSTQSEKLTNTA |
| | CHRNA4 | ATSGTQSLHPPSPSFCVPLDVPAEPGPSCKSPSDQLPP |
| | | QQPLEAEKASPHPSPGPCRPPHGT |
| 2435 | IRF5 | PPTLQPPTLRPPTLQPPTLQPPVVLGPPAPDPSPLAPP |
| | | PGNPAGFRELLSEVLEPGPLPASL |
| | PIK3R2 | RPRGPRPLPARPRDGAPEPGLTLPDLPEQFSPPDVAP |
| | | PLLVKLVEAIERTGLDSESHYRPEL |
| | ADAM17 | LSLFHPSNVEMLSSMDSASVRIIKPFPAPQTPGRLQP |
| | | APVIPSAPAAPKLDHQRMDTIQEDP |
| | PXN_0 | LLLELNAVQHNPPGFPADEANSSPPLPGALSPLYGV |
| | | PETNSPLGGKAGPLTKEKPKRNGGRG |
| | PXN_1 | NPPGFPADEANSSPPLPGALSPLYGVPETNSPLGGKA |
| | | GPLTKEKPKRNGGRGLEDVRPSVES |
| 2436 | UBR5_0 | AGLGRHEAGASSSDHQDPVSPPIAPPSWVPDPPAMD |
| | | PDGDIDFILAPAVGSLTTAATGTGQG |
| 2437 | UBR5_1 | HEAGASSSDHQDPVSPPIAPPSWVPDPPAMDPDGDI |
| | | DFILAPAVGSLTTAATGTGQGPSTST |
| | SNAI2 | THTVIISPYLYESYSMPVIPQPEILSSGAYSPITVWTT |
| | | AAPFHAQLPNGLSPLSGYSSSLGR |
| | IRS2 | NSASVENVSLRKSSEGGVGVGPGGGDEPPTSPRQLQ |
| | | PAPPLAPQGRPWTPGQPGGLVGCPGS |
| | USP10_0 | DGTGSASGTLPVSQPKSWASLFHDSKPSSSSPVAYV |
| | | ETKYSPPAISPLVSEKQVEVKEGLVP |
| | USP10_1 | PVSQPKSWASLFHDSKPSSSSPVAYVETKYSPPAISP |
| | | LVSEKQVEVKEGLVPVSEDPVAIKI |
| | USP10_2 | KSWASLFHDSKPSSSSPVAYVETKYSPPAISPLVSEK |
| | | QVEVKEGLVPVSEDPVAIKIAELLE |
| | GFI1B | EPELEQDQNLARMAPAPEGPIVLSRPQDGDSPLSDSP |
| | | PFYKPSFSWDTLATTYGHSYRQAPS |
| | LPA | PVTESSVLTTPTVAPVPSTEAPSEQAPPEKSPVVQDC |
| | | YHGDGRSYRGISSTTVTGRTCQSWS |
| | TNKS1BP1_0 | QTPEASQASPCPAVTPSAPSAALPDEGSRHTPSPGLP |
| | | AEGAPEAPRPSSPPPEVLEPHSLDQ |
| 2438 | TNKS1BP1_1 | EGSRHTPSPGLPAEGAPEAPRPSSPPPEVLEPHSLDQP |
| | | PATSPRPLIEVGELLDLTRTFPSG |
| 2439 | VCP | VINQILTEMDGMSTKKNVFIIGATNRPDIIDPAILRPG |
| | | RLDQLIYIPLPDEKSRVAILKANL |
| 2440 | CDKL5 | PLSQASGGSSNIRQEPAPKGRPALQLPGQMDPGWH |
| | | VSSVTRSATEGPSYSEQLGAKSGPNGH |
| 2441 | CYP46A1 | ETLIDGVRVPGNTPLLFSTYVMGRMDTYFEDPLTFN |
| | | PDRFGPGAPKPRFTYFPFSLGHRSCI |
| | NIPBL_0 | YQQTTISHSPSSRFVPPQTSSGNRFMPQQNSPVPSPY |
| | | APQSPAGYMPYSHPSSYTTHPQMQQ |
| | NIPBL_1 | SSRFVPPQTSSGNRFMPQQNSPVPSPYAPQSPAGYM |
| | | PYSHPSSYTTHPQMQQASVSSPIVAG |
| | FOXL2 | AHHLHAAAAPPPAPPHHGAAAPPPGQLSPASPATAA |
| | | PPAPAPTSAPGLQFACARQPELAMMH |
| | PLEKHG5 | AGTHGTPSAPSRSLSELCLAVPAPGIRTQGSPQEAGP |
| | | SWDCRGAPSPGSGPGLVGCLAGEPA |
| 2442 | COL4A2 | AGECRCTEGDEAIKGLPGLPGPKGFAGINGEPGRKG |
| | | DRGDPGQHGLPGFPGLKGVPGNIGAP |
| | COL11A1 | DDGMRGEDGEIGPRGLPGEAGPRGLLGPRGTPGAP |
| | | GQPGMAGVDGPPGPKGNMGPQGEPGPP |
| | PSD4 | SQDRDEREGGHPQESLPCTLAPCPWRSPASSPEPSSP |
| | | ESESRGPGPRPSPASSQEGSPQLQH |
| | MAP4K1_0 | ESSDDDYDDVDIPTPAEDTPPPLPPKPKFRSPSDEGP |
| | | GSMGDDGQLSPGVLVRCASGPPPNS |
| | MAP4K1_1 | PSDEGPGSMGDDGQLSPGVLVRCASGPPPNSPRPGP |
| | | PPSTSSPHLTAHSEPSLWNPPSRELD |
| 2443 | GDF5_0 | HSYGGGATNANARAKGGTGQTGGLTQPKKDEPKK |
| | | LPPRPGGPEPKPGHPPQTRQATARTVTP |
| 2444 | GDF5_1 | FHCEGLCEFPLRSHLEPTNHAVIQTLMNSMDPESTPP |
| | | TCCVPTRLSPISILFIDSANNVVYK |
| | COL3A1_0 | GPGAAGFPGARGLPGPPGSNGNPGPPGPSGSPGKDG |
| | | PPGPAGNTGAPGSPGVSGPKGDAGQP |
| | COL3A1_1 | AAGIKGHRGFPGNPGAPGSPGPAGQQGAIGSPGPAG |
| | | PRGPVGPSGPPGKDGTSGHPGPIGPP |
| 2445 | SMARCA2 | APEHVSSPMSGGGPTPPQMPPSQPGALIPGDPQAMS |
| | | QPNRGPSPFSPVQLHQLRAQILAYKM |
| | TBKBP1_0 | SSLQGRILRTLLQEQARSGGQRHSPLSQRHSPAPQCP |
| | | SPSPPARAAPPCPPCQSPVPQRRSP |
| | TBKBP1 | SPAPQCPSPSPPARAAPPCPPCQSPVPQRRSPVPPCPS |
| | | PQQRRSPASPSCPSPVPQRRSPVP |
| | TBKBP1_2 | RAAPPCPPCQSPVPQRRSPVPPCPSPQQRRSPASPSCP |
| | | SPVPQRRSPVPPSCQSPSPQRRSP |
| | TBKBP1_3 | CQSPVPQRRSPVPPCPSPQQRRSPASPSCPSPVPQRRS |
| | | PVPPSCQSPSPQRRSPVPPSCPAP |
| | INSYN1 | LDVSTPSDSVDGPESTRPGAGPDYRLMNGGTPIPNG |
| | | PRVETPDSSSEEAFGAGPTVKSQLPQ |
| 2446 | OAS3 | LRGMGDPVQSWKGPGLPRAGCSGLGHPIQLDPNQK |
| | | TPENSKSLNAVYPRAGSKPPSCPAPGP |
| | PLEKHA4 | HRMMTGGNLDSQGDPLPGVPLPPSDPTRQETPPPRS |
| | | PPVANSGSTGFSRRGSGRGGGPTPWG |
| 2447 | PLCG1 | GGWWRGDYGGKKQLWFPSNYVEEMVNPVALEPE |
| | | REHLDENSPLGDLLRGVLDVPACQIAIRP |
| | GIGYF2 | LSQIPSDTASPLLILPPPVPNPSPTLRPVETPVVGAPG |
| | | MGSVSTEPDDEEGLKHLEQQAEKM |
| | YIF1B | AVDTMYVGRKLGLLFFPYLHQDWEVQYQQDTPVA |
| | | PRFDVNAPDLYIPAMAFITYVLVAGLAL |
| | EIF4ENIF1 | SQANRYTKEQDYRPKATGRKTPTLASPVPTTPFLRP |
| | | VHQVPLVPHVPMVRPAHQLHPGLVQR |
| 2448 | ODAD1 | LADAALLVLGQSLEDLPKKMAPLQPPDTLEDPPGFE |
| | | ASDDYPMSREELLSQVEKLVELQEQA |
| | KAT5 | IPGGEPDQPLSSSSCLQPNHRSTKRKVEVVSPATPVP |
| | | SETAPASVFPQNGAARRAVAAQPGR |
| | MICALL1_0 | IMTYVSQYYNHFCSPGQAGVSPPRKGLAPCSPPSVA |
| | | PTPVEPEDVAQGEELSSGSLSEQGTG |
| | MICALL1_1 | PFEEEEEDKEEEAPAAPSLATSPALGHPESTPKSLHP |
| | | WYGITPTSSPKTKKRPAPRAPSASP |
| | MICALL1_2 | EAPAAPSLATSPALGHPESTPKSLHPWYGITPTSSPK |
| | | TKKRPAPRAPSASPLALHASRLSHS |
| | MICALL1_3 | APSLATSPALGHPESTPKSLHPWYGITPTSSPKTKKR |
| | | PAPRAPSASPLALHASRLSHSEPPS |
| | MED26 | HTSSPGLGKPPGPCLQPKASVLQQLDRVDETPGPPH |
| | | PKGPPRCSFSPRNSRHEGSFARQQSL |
| | ANKRD40_0 | VPNYLANPAFPFIYTPTAEDSAQMQNGGPSTPPASPP |
| | | ADGSPPLLPPGEPPLLGTFPRDHTS |
| | ANKRD40_1 | PFIYTPTAEDSAQMQNGGPSTPPASPPADGSPPLLPP |
| | | GEPPLLGTFPRDHTSLALVQNGDVS |
| 2449 | IL17RA_0 | QDAPSLDEEVFEEPLLPPGTGIVKRAPLVREPGSQAC |
| | | LAIDPLVGEEGGAAVAKLEPHLQPR |
| 2450 | IL17RA_1 | FEEPLLPPGTGIVKRAPLVREPGSQACLAIDPLVGEE |
| | | GGAAVAKLEPHLQPRGQPAPQPLHT |
| | DBP | AALPAATTPGPGLETAGPADAPAGAVVGGGSPRGR |
| | | PGPVPAPGLLAPLLWERTLPFGDVEYV |
| | FHIP1B_0 | ALFLRQQSLGGSESPGPAPCSPGLSASPASSPGRRPT |
| | | PAEEPGELEDNYLEYLREARRGVDR |
| | FHIP1B_1 | SPLEPPLPLEEEEAYESFTCPPEPPGPFLSSPLRTLNQL |
| | | PSQPFTGPFMAVLFAKLENMLQN |
| 2451 | CANX | FEILVDQSVVNSGNLLNDMTPPVNPSREIEDPEDRKP |
| | | EDWDERPKIPDPEAVKPDDWDEDAP |
| | EXOSC10 | ALADFIHQQRTQQVEQDMFAHPYQYELNHFTPADA |
| | | VLQKPQPQLYRPIEETPCHFISSLDEL |
| 2452 | STAT2 | SQTVPEPDQGPVSQPVPEPDLPCDLRHLNTEPMEIFR |
| | | NCVKIEEIMPNGDPLLAGQNTVDEV |
| 2453 | DBX2 | FGNLGKSFLIENLLRVGGAPTPRLQPPAPHDPATAL |
| | | ATAGAQLRPLPASPVPLKLCPAAEQV |
| | KRTAP10-7 | CSDSWQVDDCPESCCEPPCCAPAPCLSLVCTPVSYV |
| | | SSPCCRVTCEPSPCQSGCTSSCTPSC |
| 2454 | KIAA0754_0 | HAPEEPDTAAVRVSTPEEPASPAAAVPTPEEPTSPAA |
| | | AVPTPEEPTSPAAAVPPPEEPTSPA |
| 2455 | KIAA0754_1 | STPEEPASPAAAVPTPEEPTSPAAAVPTPEEPTSPAA |
| | | AVPPPEEPTSPAAAVPTPEEPTSPA |
| 2456 | KIAA0754_2 | PTPEEPTSPAAAVPTPEEPTSPAAAVPPPEEPTSPAAA |
| | | VPTPEEPTSPAAAVPTPEEPTSPA |
| 2457 | KIAA0754_3 | PTPEEPTSPAAAVPPPEEPTSPAAAVPTPEEPTSPAAA |
| | | VPTPEEPTSPAAAVPTPEEPTSPA |
| 2458 | KIAA0754_4 | PPPEEPTSPAAAVPTPEEPTSPAAAVPTPEEPTSPAAA |
| | | VPTPEEPTSPAAAVPTPEEPTSPA |
| 2459 | KIAA0754_5 | PTPEEPTSPAAAVPTPEEPTSPAAAVPTPEEPTSPAAA |
| | | VPTPEEPTSPAAAVPTPEEPTSPA |
| 2460 | KIAA0754_6 | PTPEEPTSPAAAVPTPEEPTSPAAAVPTPEEPTSPAAA |
| | | VPTPEEPTSPAAAVPTPEEPASPA |
| 2461 | KIAA0754_7 | PTPEEPTSPAAAVPTPEEPTSPAAAVPTPEEPTSPAAA |
| | | VPTPEEPASPAAAVPTPEEPASPA |
| 2462 | KIAA0754_8 | PTPEEPTSPAAAVPTPEEPTSPAAAVPTPEEPASPAA |
| | | AVPTPEEPASPAAAVPTPEEPAFPA |
| 2463 | KIAA0754_9 | PTPEEPTSPAAAVPTPEEPASPAAAVPTPEEPASPAA |
| | | AVPTPEEPAFPAPAVPTPEESASAA |
| | KIAA0754_10 | EEPTSPAAAVPTPEEPASPAAAVPTPEEPASPAAAVP |
| | | TPEEPAFPAPAVPTPEESASAAVAV |
| 2464 | KIAA0754_11 | PTPEEPASPAAAVPTPEEPASPAAAVPTPEEPAFPAP |
| | | AVPTPEESASAAVAVPTPEESASPA |
| | KIAA0754_12 | AAVPTPEEPASPAAAVPTPEEPAFPAPAVPTPEESAS |
| | | AAVAVPTPEESASPAAAVPTPAESA |
| | KIAA0754_13 | AVVATLEEPTSPAASVPTPAAMVATLEEFTSPAASV |
| | | PTSEEPASLAAAVSNPEEPTSPAAAV |
| 2465 | KIAA0754_14 | SPAASVPTPAAMVATLEEFTSPAASVPTSEEPASLAA |
| | | AVSNPEEPTSPAAAVPTLEEPTSSA |
| 2466 | KIAA0754_15 | PTSEEPASLAAAVSNPEEPTSPAAAVPTLEEPTSSAA |
| | | AVLTPEELSSPAASVPTPEEPASPA |
| | ATG9B_0 | FSPPTAGPPCSVLQGTGASQSCHSALPIPATPPTQAQ |
| | | PAMTPASASPSWGSHSTPPLAPATP |
| | ATG9B_1 | SVLQGTGASQSCHSALPIPATPPTQAQPAMTPASASP |
| | | SWGSHSTPPLAPATPTPSQQCPQDS |
| | ATG9B_2 | TGASQSCHSALPIPATPPTQAQPAMTPASASPSWGS |
| | | HSTPPLAPATPTPSQQCPQDSPGLRV |
| | ATG9B_3 | PTQAQPAMTPASASPSWGSHSTPPLAPATPTPSQQC |
| | | PQDSPGLRVGPLIPEQDYERLEDCDP |
| | ILF3 | RDSSKGEDSAEETEAKPAVVAPAPVVEAVSTPSAAF |
| | | PSDATAEQGPILTKHGKNPVMELNEK |
| | SLC25A46 | RSFSTGSDLGHWVTTPPDIPGSRNLHWGEKSPPYGV |
| | | PTTSTPYEGPTEEPFSSGGGGSVQGQ |
| | CBS | PEDKEAKEPLWIRPDAPSRCTWQLGRPASESPHHHT |
| | | APAKSPKILPDILKKIGDTPMVRINK |
| | PELP1 | SSFCSEALVTCAALTHPRVPPLQPMGPTCPTPAPVPP |
| | | PEAPSPFRAPPFHPPGPMPSVGSMP |
| | PAK5 | QKFTGLPQQWHSLLADTANRPKPMVDPSCITPIQLA |
| | | PMKTIVRGNKPCKETSINGLLEDFDN |
| 2467 | VHL | PEESGPEELGAEEEMEAGRPRPVLRSVNSREPSQVIF |
| | | CNRSPRVVLPVWLNFDGEPQPYPTL |
| | NR4A3_0 | DPPMKAVPTVAGARFPLFHFKPSPPHPPAPSPAGGH |
| | | HLGYDPTAAAALSLPLGAAAAAGSQA |
| | NR4A3_1 | GSQAAALESHPYGLPLAKRAAPLAFPPLGLTPSPTAS |
| | | SLLGESPSLPSPPSRSSSSGEGTCA |
| 2468 | TRIM11 | PNRPLAKMAEMARRLHPPSPVPQGVCPAHREPLAA |
| | | FCGDELRLLCAACERSGEHWAHRVRPL |
| | TFAP2A_0 | HDGTSNGTARLPQLGTVGQSPYTSAPPLSHTPNADF |
| | | QPPYFPPPYQPIYPQSQDPYSHVNDP |
| 2469 | TFAP2A_1 | TPNADFQPPYFPPPYQPIYPQSQDPYSHVNDPYSLNP |
| | | LHAQPQPQHPGWPGQRQSQESGLLH |
| | FAM161A | IKREKILADIEADEENLKETRWPYLSPRRKSPVRCAG |
| | | VNPVPCNCNPPVPTVSSRGREQAVR |
| | ADAMTS14_0 | HRLCCVSCIKKASGPNPGPDPGPTSLPPFSTPGSPLPG |
| | | PQDPADAAEPPGKPTGSEDHQHGR |
| 2470 | ADAMTS14_1 | KASGPNPGPDPGPTSLPPFSTPGSPLPGPQDPADAAE |
| | | PPGKPTGSEDHQHGRATQLPGALDT |
| | FNDC3A | VQVNPGEAFTIRREDGQFQCITGPAQVPMMSPNGSV |
| | | PPIYVPPGYAPQVIEDNGVRRVVVVP |
| 2471 | PARL | PQLLGRRFNFFIQQKCGFRKAPRKVEPRRSDPGTSG |
| | | EAYKRSALIPPVEETVFYPSPYPIRS |
| 2472 | GDF6_0 | RSRKEGKMQRAPRDSDAGREGQEPQPRPQDEPRAQ |
| | | QPRAQEPPGRGPRVVPHEYMLSIYRTY |
| 2473 | GDF6_1 | APRDSDAGREGQEPQPRPQDEPRAQQPRAQEPPGR |
| | | GPRVVPHEYMLSIYRTYSIAEKLGINA |
| | GDF6_2 | GAELRLFRQAPSAPWGPPAGPLHVQLFPCLSPLLLD |
| | | ARTLDPQGAPPAGWEVFDVWQGLRHQ |
| 2474 | GDF6_3 | YHCEGVCDFPLRSHLEPTNHAIIQTLMNSMDPGSTP |
| | | PSCCVPTKLTPISILYIDAGNNVVYK |
| 2475 | ACHE | LVTVRGGRLRGIRLKTPGGPVSAFLGIPFAEPPMGPR |
| | | RFLPPEPKQPWSGVVDATTFQSVCY |
| | ZMYND8 | SASEESMDFLDKSTASPASTKTGQAGSLSGSPKPFSP |
| | | QLSAPITTKTDKTSTTGSILNLNLD |
| | SOX8 | QGDYGDLQASSYYGAYPGYAPGLYQYPCFHSPRRP |
| | | YASPLLNGLALPPAHSPTSHWDQPVYT |
| | ROBO4 | QTQPPVAPQAPSSILLPAAPIPILSPCSPPSPQASSLSG |
| | | PSPASSRLSSSSLSSLGEDQDSV |
| | MYO15A_0 | SPPVPPRPPSSGPPPAPPLSPALSGLPRPASPYGSLRR |
| | | HPPPWAAPAHVPPAPQASWWAFVE |
| 2476 | MYO15A_1 | PYGSLRRHPPPWAAPAHVPPAPQASWWAFVEPPAV |
| | | SPEVPPDLLAFPGPRPSFRGSRRRGAA |
| | MYO15A_2 | RRHPPPWAAPAHVPPAPQASWWAFVEPPAVSPEVP |
| | | PDLLAFPGPRPSFRGSRRRGAAFGFPG |
| | MYO15A_3 | PPFLPPARRPRSLQESPAPRRAAGRLGPPGSPLPGSPR |
| | | PPSPPLGLCHSPRRSSLNLPSRLP |
| | MYO15A_4 | SLPAEKPPAPEAQPTSVGTGPPAKPVLLRATPKPLAP |
| | | APLAKAPRLPIKPVAAPVLAQDQAS |
| 2477 | NCOR2_0 | NGPKPPATLGADGPPPGPPTPPPEDIPAPTEPTPASEA |
| | | TGAPTPPPAPPSPSAPPPVVPKEE |
| | NCOR2_1 | PKPPATLGADGPPPGPPTPPPEDIPAPTEPTPASEATG |
| | | APTPPPAPPSPSAPPPVVPKEEKE |
| | NCOR2_2 | GPPPGPPTPPPEDIPAPTEPTPASEATGAPTPPPAPPSP |
| | | SAPPPVVPKEEKEEETAAAPPVE |
| | ELK3 | AAAASAFLASSVSAKISSLMLPNAASISSASPFSSRSP |
| | | SLSPNSPLPSEHRSLFLEAACHDS |
| 2478 | SIRT2 | PSTGLYDNLEKYHLPYPEAIFEISYFKKHPEPFFALA |
| | | KELYPGQFKPTICHYFMRLLKDKGL |
| | E2F7_0 | VGPSSGQLPSFSVPCMVLPSPPLGPFPVLYSPAMPGP |
| | | VSSTLGALPNTGPVNFSLPGLGSIA |
| | E2F7_1 | SHSVVQQPESPVYVGHPVSVVKLHQSPVPVTPKSIQ |
| | | RTHRETFFKTPGSLGDPVLKRRERNQ |
| 2479 | CDHR5 | QAFLPDHKANWAPVPSPTHDPKPAEAPMPAEPAPP |
| | | GPASPGGAPEPPAAARAGGSPTAVRSI |
| 2480 | KLF4_0 | PPPTAPFNLADINDVSPSGGFVAELLRPELDPVYIPPQ |
| | | QPQPPGGGLMGKFVLKASLSAPGS |
| | KLF4_1 | GLMGKFVLKASLSAPGSEYGSPSVISVSKGSPDGSH |
| | | PVVVAPYNGGPPRTCPKIKQEAVSSC |
| | PKD1 | WEPLKVLLEALYFSLVAKRLHPDEDDTLVESPAVTP |
| | | VSARVPRVRPPHGFALFLAKEEARKV |
| | ATXN2_0 | VPWPSPCPSPSSRPPSRYQSGPNSLPPRAATPTRPPSR |
| | | PPSRPSRPPSHPSAHGSPAPVSTM |
| | ATXN2_1 | NPNAKEFNPRSFSQPKPSTTPTSPRPQAQPSPSMVGH |
| | | QQPTPVYTQPVCFAPNMMYPVPVSP |
| | ATXN2_2 | SFSQPKPSTTPTSPRPQAQPSPSMVGHQQPTPVYTQP |
| | | VCFAPNMMYPVPVSPGVQPLYPIPM |
| | ATXN2_3 | SPSMVGHQQPTPVYTQPVCFAPNMMYPVPVSPGVQ |
| | | PLYPIPMTPMPVNQAKTYRAVPNMPQQ |
| | KNG1 | IQSDDDWIPDIQIDPNGLSFNPISDFPDTTSPKCPGRP |
| | | WKSVSEINPTTQMKESYYFDLTDG |
| 2481 | TUBGCP6 | SDVVSTRPRWNTHVPIPPPHMVLGALSPEAEPNTPR |
| | | PQQSPPGHTSQSALSLGAQSTVLDCG |
| | ULK1 | SHGLQSCRNLRGSPKLPDFLQRNPLPPILGSPTKAVP |
| | | SFDFPKTPSSQNLLALLARQGVVMT |
| 2482 | WEE1_0 | FSPCSDCEEEEEEEEEEGSGHSTGEDSAFQEPDSPLPP |
| | | ARSPTEPGPERRRSPGPAPGSPGE |
| | WEE1_1 | EEEEEEEGSGHSTGEDSAFQEPDSPLPPARSPTEPGPE |
| | | RRRSPGPAPGSPGELEEDLLLPGA |
| 2483 | WEE1_2 | EEEEGSGHSTGEDSAFQEPDSPLPPARSPTEPGPERR |
| | | RSPGPAPGSPGELEEDLLLPGACPG |
| | WEE1_3 | FQEPDSPLPPARSPTEPGPERRRSPGPAPGSPGELEED |
| | | LLLPGACPGADEAGGGAEGDSWEE |
| | COL2A1_0 | PAGEQGPRGDRGDKGEKGAPGPRGRDGEPGTPGNP |
| | | GPPGPPGPPGPPGLGGNFAAQMAGGFD |
| 2484 | COL2A1_1 | PMGPMGPRGPPGPAGAPGPQGFQGNPGEPGEPGVS |
| | | GPMGPRGPPGPPGKPGDDGEAGKPGKA |
| 2485 | COL2A1_2 | EQGPKGEPGPAGPQGAPGPAGEEGKRGARGEPGGV |
| | | GPIGPPGERGAPGNRGFPGQDGLAGPK |
| | COL2A1_3 | LVGPRGERGFPGERGSPGAQGLQGPRGLPGTPGTDG |
| | | PKGASGPAGPPGAQGPPGLQGMPGER |
| 2486 | COL2A1_4 | PKGARGDSGPPGRAGEPGLQGPAGPPGEKGEPGDD |
| | | GPSGAEGPPGPQGLAGQRGIVGLPGQR |
| | COL2A1_5 | APGASGDRGPPGPVGPPGLTGPAGEPGREGSPGADG |
| | | PPGRDGAAGVKGDRGETGAVGAPGAP |
| 2487 | AMH | APLPAHGQLDTVPFPPPRPSAELEESPPSADPFLETLT |
| | | RLVRALRVPPARASAPRLALDPDA |
| | CACNA1G | LQLPKDAPHLLQPHSAPTWGTIPKLPPPGRSPLAQRP |
| | | LRRQAAIRTDSLDVQGLGSREDLLA |
| | PTK2_0 | RMESRRQATVSWDSGGSDEAPPKPSRPGYPSPRSSE |
| | | GFYPSPQHMVQTNHYQVSGYPGSHGI |
| | PTK2_1 | SWDSGGSDEAPPKPSRPGYPSPRSSEGFYPSPQHMV |
| | | QTNHYQVSGYPGSHGITAMAGSIYPG |
| | TAB3 | QSSPQGPVPHYSQRPLPVYPHQQNYQPSQYSPKQQQ |
| | | IPQSAYHSPPPSQCPSPFSSPQHQVQ |
| 2488 | FCRLA_0 | GPGIPETASVVAITVQELFPAPILRAVPSAEPQAGSP |
| | | MTLSCQTKLPLQRSAARLLFSFYKD |
| | FCRLA_1 | ETASVVAITVQELFPAPILRAVPSAEPQAGSPMTLSC |
| | | QTKLPLQRSAARLLFSFYKDGRIVQ |
| | PTCH1 | LNGLVLLPVLLSFFGPYPEVSPANGLNRLPTPSPEPPP |
| | | SVVRFAMPPGHTHSGSDSSDSEYS |
| 2489 | REST | KKQNTCMKKSTKKKTLKNKSSKKSSKPPQKEPVEK |
| | | GSAQMDPPQMGPAPTEAVQKGPVQVEP |
| | ZNF804A | CEVYQHILQPNMLANKVKFTFPPAALPPPSTPLQPLP |
| | | LQQSLCSTSVTTIHHTVLQQHAAAA |
| | RGS12 | VQESSDSPSTSPGSASSPPGPPGTTPPGQKSPSGPFCT |
| | | PQSPVSLAQEGTAQIWKRQSQEVE |
| 2490 | COL5A1_0 | PSEIGPGMPANQDTIYEGIGGPRGEKGQKGEPAIIEP |
| | | GMLIEGPPGPEGPAGLPGPPGTMGP |
| 2491 | COL5A1_1 | PGMPANQDTIYEGIGGPRGEKGQKGEPAIIEPGMLIE |
| | | GPPGPEGPAGLPGPPGTMGPTGQVG |
| 2492 | COL5A1_2 | RLALRGPAGPMGLTGRPGPVGPPGSGGLKGEPGDV |
| | | GPQGPRGVQGPPGPAGKPGRRGRAGSD |
| 2493 | COL5A1_3 | IKGDRGEIGPPGPRGEDGPEGPKGRGGPNGDPGPLG |
| | | PPGEKGKLGVPGLPGYPGRQGPKGSI |
| | COL5A1_4 | FPGDRGLPGPVGALGLKGNEGPPGPPGPAGSPGERG |
| | | PAGAAGPIGIPGRPGPQGPPGPAGEK |
| | COL5A1_5 | ERGEKGESGPSGAAGPPGPKGPPGDDGPKGSPGPVG |
| | | FPGDPGPPGEPGPAGQDGPPGDKGDD |
| | COL5A1_6 | PIGPQGAPGKPGPDGLRGIPGPVGEQGLPGSPGPDGP |
| | | PGPMGPPGLPGLKGDSGPKGEKGHP |
| | PAK4_0 | APNGPSAGGLAIPQSSSSSSRPPTRARGAPSPGVLGP |
| | | HASEPQLAPPACTPAAPAVPGPPGP |
| 2494 | PAK4_1 | AIPQSSSSSSRPPTRARGAPSPGVLGPHASEPQLAPPA |
| | | CTPAAPAVPGPPGPRSPQREPQRV |
| 2495 | CAMSAP2 | YLVFMAELFWWFEVVKPSFVQPRVVRPQGAEPVK |
| | | DMPSIPVLNAAKRNVLDSSSDFPSSGEG |
| 2496 | FGF21 | ELLLEDGYNVYQSEAHGLPLHLPGNKSPHRDPAPR |
| | | GPARFLPLPGLPPALPEPPGILAPQPP |
| | SFPQ | GVGSAPPASSSAPPATPPTSGAPPGSGPGPTPTPPPAV |
| | | TSAPPGAPPPTPPSSGVPTTPPQA |
| | ANKRD11_0 | DSPMPPSMEDRAPLPPVPAEKFACLSPGYYSPDYGL |
| | | PSPKVDALHCPPAAVVTVTPSPEGVF |
| 2497 | ANKRD11_1 | DGAGPEDDTEASRAAAPAEGPPGGIQPEAAEPKPTA |
| | | EAPKAPRVEEIPQRMTRNRAQMLANQ |
| | TICRR_0 | TPRTPKRQGTQPPGFLPNCTWPHSVNSSPESPSCPAP |
| | | PTSSTAQPRRECLTPIRDPLRTPPR |
| | TICRR_1 | PALSMPRASRSLSKPEPTYVSPPCPRLSHSTPGKSRG |
| | | QTYICQACTPTHGPSSTPSPFQTDG |
| | PSMB8 | APRGQRPESALPVAGSGRRSDPGHYSFSMRSPELAL |
| | | PRGMQPTEFFQSLGGDGERNVQIEMA |
| 2498 | CARMIL2_0 | LSAARDQLVESLAQQATVTMPPALPAPDGGEPSLLE |
| | | PGELEGLFFPEEKEEEKEKDDSPPQK |
| 2499 | CARMIL2_1 | DQLVESLAQQATVTMPPALPAPDGGEPSLLEPGELE |
| | | GLFFPEEKEEEKEKDDSPPQKWPELS |
| 2500 | ESRRA | SSQVVGIEPLYIKAEPASPDSPKGSSETETEPPVALAP |
| | | GPAPTRCLPGHKEEEDGEGAGPGE |
| | STIM1_0 | LAKKALLALNHGLDKAHSLMELSPSAPPGGSPHLDS |
| | | SRSHSPSSPDPDTPSPVGDSRALQAS |
| | STIM1_1 | HGLDKAHSLMELSPSAPPGGSPHLDSSRSHSPSSPDP |
| | | DTPSPVGDSRALQASRNTRIPHLAG |
| 2501 | STIM1_2 | AHSLMELSPSAPPGGSPHLDSSRSHSPSSPDPDTPSPV |
| | | GDSRALQASRNTRIPHLAGKKAVA |
| | CAPN15 | MLEPGEYAVVCCAFNHWGPPLPGTPAPQASSPSAG |
| | | VPRASPEPPGHVLAVYSSRLVMVEPVE |
| 2502 | GRID2IP | SHPYASLDSSRAPSPQPGPGPICPDSPPSPDPTRPPSR |
| | | RKLFTFSHPVRSRDTDRFLDVLSE |
| | BAHCC1 | PTAPGAPSPAAGPTKLPPCCHPPDPKPPASSPTPPPRP |
| | | SAPCTLNVCPASSPGPGSRVRSAE |
| 2503 | MAGI1 | QQQQQQTEEWTEDHSALVPPVIPNHPPSNPEPAREV |
| | | PLQGKPFFTRNPSELKGKFIHTKLRK |
| 2504 | ZBTB20 | FDSGVSSSIGTEPDSVEQQFGPGAARDSQAEPTQPEQ |
| | | AAEAPAEGGPQTNQLETGASSPERS |
| | KIAA1210_0 | QVIIRGLPVWFSHFQGILEGSLQCVTQTLETPNLDEP |
| | | LPVEPKEEEPNLPLVSEEEKSITKP |
| 2506 | KIAA1210_1 | GLPVWFSHFQGILEGSLQCVTQTLETPNLDEPLPVEP |
| | | KEEEPNLPLVSEEEKSITKPKEINE |
| 2507 | KIAA1210_2 | FSHFQGILEGSLQCVTQTLETPNLDEPLPVEPKEEEP |
| | | NLPLVSEEEKSITKPKEINEKKLGM |
| 2508 | KIAA1210_3 | GILEGSLQCVTQTLETPNLDEPLPVEPKEEEPNLPLV |
| | | SEEEKSITKPKEINEKKLGMDSADS |
| | KIAA1210_4 | GNLTKISYVADKQQSRPKSESMAKKQPACKTPGKP |
| | | AGQQSDYAVSEPVWITMAKQKQKSFKA |
| | MYO9B_0 | ASTESLLEERAGRGASEGPPAPALPCPGAPTPSPLPT |
| | | VAAPPRRRPSSFVTVRVKTPRRTPI |
| | MYO9B_1 | WAPGAREAAAPVRRREPPARRPDQIHSVYITPGADL |
| | | PVQGALEPLEEDGQPPGAKRRYSDPP |
| | TRPM2_0 | FRGAVYHSYLTIFGQIPGYIDGVNFNPEHCSPNGTDP |
| | | YKPKCPESDATQQRPAFPEWLTVLL |
| 2509 | TRPM2_1 | YHSYLTIFGQIPGYIDGVNFNPEHCSPNGTDPYKPKC |
| | | PESDATQQRPAFPEWLTVLLLCLYL |
| 2510 | TRPM2_2 | ARHLLYPNCPVTRFPVPNEKVPWETEFLIYDPPFYT |
| | | AERKDAAAMDPMGDTLEPLSTIQYNV |
| | TBX10 | AFLSAGLGILAPSETYPLPTTSSGWEPRLGSPFPSGPC |
| | | TSSTGAQAVAEPTGQGPKNPRVSR |
| | C11orf53 | ALLEPYFPQEPYGDYRPPALTPNAGSLFSASPLPPLL |
| | | PPPFPGDPAHFLFRDSWEQTLPDGL |
| 2511 | GNL1 | QIQEPYTAVGYLASRIPVQALLHLRHPEAEDPSAEHP |
| | | WCAWDICEAWAEKRGYKTAKAARND |
| | UNC13A | LPPAAPGKEDKAPVAPTEAPDMAKVAPKPATPDKV |
| | | PAAEQIPEAEPPKDEESFRPREDEEGQ |
| | AGAP2_0 | VPPGPPLSGGLSPDPKPGGAPTSSRRPLLSSPSWGGP |
| | | EPEGRAGGGIPGSSSPHPGTGSRRL |
| | AGAP2_1 | KGKSKTLDNSDLHPGPPAGSPPPLTLPPTPSPATAVT |
| | | AASAQPPGPAPPITLEPPAPGLKRG |
| 2512 | ZNF517 | HHRLHAQEGAQDGGVGQGALLGAAQRPQAGDPPH |
| | | ECPVCGRPFRHNSLLLLHLRLHTGEKPF |
| | SOCS1 | VAHNQVAADNAVSTAAEPRRRPEPSSSSSSSPAAPA |
| | | RPRPCPAVPAPAPGDTHFRTFRSHAD |
| | SPATA31D4 | LADLFSPSPLRDPLPPQPVSPLDSKFPIDHSPPQQLPF |
| | | PLLPPHHIERVEPSLQPEASLSLN |
| 2513 | KIAA1671_0 | PFSKEQDVKSPVPSLRPSSTGPSPSGGLSEEPAAKDL |
| | | DNRMPGLVGQEVGSGEGPRTSSPLF |
| | KIAA1671_1 | IIDVDALWSHRGSEDGPRPQSNWKESANKMSPSGG |
| | | APQTTPTLRSRPKDLPVRRKTDVISDT |
| 2514 | ERFL | PSPFGGAPGPDAPPLTPETLQTLFSAPRLGEPGARTP |
| | | LFTSETDKLRLDSPFPFLGSGATSY |
| | PROX2 | RVQLQAGVPVGNLSLAKRLDSPRYPIPPRMTPKPCQ |
| | | DPPANFPLTAPSHIQENQILSQLLGH |
| | LRRC37A3 | PEHSHLTQATVQPLDLGFTITPESMTEVELSPTMKET |
| | | PTQPPKKVVPQLRVYQGVTNPTPGQ |
| 2515 | MROH1_0 | AMAHHGYLEQPGGEAMIEYIVQQCALPPEQEPEKP |
| | | GPGSKDPKADSVRAISVRTLYLVSTTV |
| 2516 | MROH1_1 | PGGEAMIEYIVQQCALPPEQEPEKPGPGSKDPKADS |
| | | VRAISVRTLYLVSTTVDRMSHVLWPY |
| | POM121L2 | TIWSLRHPRPIWSPVTIRITPPDQRVPPSTSPEDVIALA |
| | | GLPPSEELADPCSKETVLRALRE |
| 2517 | MIER2 | LPSSEPGPCSFQQLDESPAVPLSHRPPALADPASYQP |
| | | AVTAPEPDASPRLAVDFALPKELPL |
| | LRRC66 | SAHYSEVPYGDPRDTGPSVFPPRWDSGLDVTPANK |
| | | EPVQKSTPSDTCCELESDCDSDEGSLF |
| | KIF26A_0 | LQAPASHEDLDAPHGGPSLAPPSTTTSSRDTPGPAGP |
| | | AGRQPGRAGPDRTKGLAWSPGPSVQ |
| | KIF26A_1 | TSSRDTPGPAGPAGRQPGRAGPDRTKGLAWSPGPS |
| | | VQVSVAPAGLGGALSTVTIQAQQCLEG |
| 2518 | KIF26A_2 | RIWPAQGAQRSAEAMSFLKVDPRKKQVILYDPAAG |
| | | PPGSAGPRRAATAAVPKMFAFDAVFPQ |
| 2519 | KIF26A_3 | SSSGGESSCEEGRARRPPHLRPFHPRTVALDPDRTPP |
| | | CLPGDPDYSSSSEQSCDTVIYVGPG |
| | KIF26A_4 | TFAELQERLECMDGNEGPSGGPGGTDGAQASPARG |
| | | GRKPSPPEAASPRKAVGTPMAASTPRG |
| | KIF26A_5 | LAPKAGFLPRPSGAAPPAPPTRKSSLEQRSSPASAPP |
| | | HAVNPARVGAAAVLRGEEEPRPSSR |
| 2520 | PRRC2B_0 | SLKSENKGNDPNIVIVPKDGTGWANKQDQQDPKSS |
| | | SATASQPPESLPQPGLQKSVSNLQKPT |
| | PRRC2B_1 | DQKCKQARKAGEARKQAEKEVPWSPSAEKASPQE |
| | | NGPAVHKGSPEFPAQETPTTFPEEAPTV |
| 2521 | DDR1 | NSSPALGGTFPPAPWWPPGPPPTNFSSLELEPRGQQP |
| | | VAKAEGSPTAILIGCLVAIILLLLL |
| | BNC1 | KGQPAFPNIGQNGVLFPNLKTVQPVLPFYRSPATPA |
| | | EVANTPGILPSLPLLSSSIPEQLISN |
| | SPATA31D3 | LADLFSPSPLRDPLPPQPVSPLDSKFPIDHSPPQQLPF |
| | | PLLPPHHIERVEPSLQPEASLSLN |
| | CXorf49_0 | ADTSRQASFHCKESYLPVPGRFLTSAPRGLTPVAER |
| | | PAVGELEDSPQKKMQSRAWGKVEVRP |
| 2522 | CXorf49_1 | RPGLPRLSVRRGEFSSSDPNIRAPQLPGTSEPSAYSPG |
| | | GLVPRRHAPSGNQQPPVHPPRPER |
| | CXorf49_2 | RLSVRRGEFSSSDPNIRAPQLPGTSEPSAYSPGGLVP |
| | | RRHAPSGNQQPPVHPPRPERQQQPP |
| | CXorf49B_0 | ADTSRQASFHCKESYLPVPGRFLTSAPRGLTPVAER |
| | | PAVGELEDSPQKKMQSRAWGKVEVRP |
| 2523 | CXorf49B_1 | RPGLPRLSVRRGEFSSSDPNIRAPQLPGTSEPSAYSPG |
| | | GLVPRRHAPSGNQQPPVHPPRPER |
| | CXorf49B_2 | RLSVRRGEFSSSDPNIRAPQLPGTSEPSAYSPGGLVP |
| | | RRHAPSGNQQPPVHPPRPERQQQPP |
| 2524 | PITPNM2 | IPALDVFQLRPACQQVYNLFHPADPSASRLEPLLERR |
| | | FHALPPFSVPRYQRYPLGDGCSTLL |
| 2525 | AHRR | ETPGPTKPLPWTAGKHSEDGARPRLQPSKNDPPSLR |
| | | PMPRGSCLPCPCVQGTFRNSPISHPP |
| | TNRC18_0 | ALKAKVIQKLEDVSKPPAYAYPATPSSHPTSPPPASP |
| | | PPTPGITRKEEAPENVVEKKDLELE |
| | TNRC18_1 | AATLEEGNPTDEVPSTPLALEPSSTPGSKKSPPEPVD |
| | | KRAKAPKARPAPPQPSPAPPAFTSC |
| 2526 | TNRC18_2 | VDKRAKAPKARPAPPQPSPAPPAFTSCPAPEPFAELP |
| | | APATSLAPAPLITMPATRPKPKKAR |
| 2527 | ODF3B | PHRPRGPIAAHYGGPGPKYKLPPNTGYALHDPSRPR |
| | | APAFTFGARFPTQQTTCGPGPGHLVP |
| 2528 | IL16 | PAASEARDPGVSESPPPGRQPNQKTLPPGPDPLLRLL |
| | | STQAEESQGPVLKMPSQRARSFPLT |
| 2529 | SRMS | LRRRLAFLSFFWDKIWPAGGEPDHGTPGSLDPNTDP |
| | | VPTLPAEPCSPFPQLFLALYDFTARC |
| | RNF225 | RPQLVALAPAPGFSWFPPRPPPGSPWAPAWTPRPTG |
| | | PDLDTALPGTAEDALEPEAGPEDPAE |
| 2530 | PCNX3_0 | RPPGPGLLSSEGPSGKWSLGGRKGLGGSDGEPASGS |
| | | PKGGTPKSQAPLDLSLSLSLSLSPDV |
| | PCNX3_1 | GLLSSEGPSGKWSLGGRKGLGGSDGEPASGSPKGG |
| | | TPKSQAPLDLSLSLSLSLSPDVSTEAS |
| | PCNX3_2 | EGPSGKWSLGGRKGLGGSDGEPASGSPKGGTPKSQ |
| | | APLDLSLSLSLSLSPDVSTEASPPRAS |
| | RGL4 | PRPGQHALTMPALEPAPPLLADLGPALEPESPAALG |
| | | PPGYLHSAPGPAPAPGEGPPPGTVLE |
| | SALL3_0 | PVEKEAEPMDAEPAGDTRAPRPPPAAPAPPTPAYGA |
| | | PSTNVTLEALLSTKVAVAQFSQGARA |
| | SALL3_1 | VPTSVGLQLPPTVPGAHGYADSPSATPASRSPQRPSP |
| | | ASSECASLSPGLNHVESGVSATAES |
| | SALL3_2 | GLQLPPTVPGAHGYADSPSATPASRSPQRPSPASSEC |
| | | ASLSPGLNHVESGVSATAESPQSLL |
| | SREBF1_0 | LQLINNQDSDFPGLFDPPYAGSGAGGTDPASPDTSSP |
| | | GSLSPPPATLSSSLEAFLSGPQAAP |
| | SREBF1_1 | SPGSLSPPPATLSSSLEAFLSGPQAAPSPLSPPQPAPTP |
| | | LKMYPSMPAFSPGPGIKEESVPL |
| | SHISA7 | DINVPRALVDILRHQAGPGTRPDRARSSSLTPGIGGP |
| | | DSMPPRTPKNLYNTVKTPNLDWRAL |
| | KIF24 | LPVSSATRHLWLSSSPPDNKPGGDLPALSPSPIRQHP |
| | | ADKLPSREADLGEACQSRETVLFSH |
| | C4orf54 | PETGQYVDVPMTSQQQAVAPMSISVPPLALSPGAY |
| | | GPTYMIYPGFLPTVLPTNALQPTPIAR |
| | NPIPB8 | PPSVDDNLKECLFVPLPPSPLPPSVDDNLKTPPLATQ |
| | | EAEVEKPPKPKRWRVDEVEQSPKPK |
| 2531 | ASCL5_0 | ALVDRRPLGPPSCMQLGVMPPPRQAPLPPAEPLGNV |
| | | PFLLYPGPAEPPYYDAYAGVFPYVPF |
| 2532 | ASCL5_1 | LGVMPPPRQAPLPPAEPLGNVPFLLYPGPAEPPYYD |
| | | AYAGVFPYVPFPGAFGVYEYPFEPAF |
| | ATXN2L | LKPQPLQQPSQPQQPPPTQQAVARRPPGGTSPPNGG |
| | | LPGPLATSAAPPGPPAAASPCLGPVA |
| | HDAC5 | SKEPTPGGLNHSLPQHPKCWGAHHASLDQSSPPQSG |
| | | PPGTPPSYKLPLPGPYDSRDDFPLRK |
| | ATF7IP_0 | WKETPCILSVNVKNKQDDDLNCEPLSPHNITPEPVS |
| | | KLPAEPVSGDPAPGDLDAGDPASGVL |
| 2533 | ATF7IP_1 | ETPCILSVNVKNKQDDDLNCEPLSPHNITPEPVSKLP |
| | | AEPVSGDPAPGDLDAGDPASGVLAS |
| 2534 | ATF7IP_2 | NVKNKQDDDLNCEPLSPHNITPEPVSKLPAEPVSGD |
| | | PAPGDLDAGDPASGVLASGDSTSGDP |
| 2535 | ATF7IP_3 | QDDDLNCEPLSPHNITPEPVSKLPAEPVSGDPAPGDL |
| | | DAGDPASGVLASGDSTSGDPTSSEP |
| 2536 | ATF7IP_4 | SPHNITPEPVSKLPAEPVSGDPAPGDLDAGDPASGVL |
| | | ASGDSTSGDPTSSEPSSSDAASGDA |
| 2537 | ATF7IP_5 | DATSGDAPSGDVSPGDATSGDATADDLSSGDPTSSD |
| | | PIPGEPVPVEPISGDCAADDIASSEI |
| 2538 | ATF7IP_6 | DAPSGDVSPGDATSGDATADDLSSGDPTSSDPIPGEP |
| | | VPVEPISGDCAADDIASSEITSVDL |
| 2539 | ATF7IP_7 | DVSPGDATSGDATADDLSSGDPTSSDPIPGEPVPVEP |
| | | ISGDCAADDIASSEITSVDLASGAP |
| 2540 | ATF7IP_8 | DATSGDATADDLSSGDPTSSDPIPGEPVPVEPISGDC |
| | | AADDIASSEITSVDLASGAPASTDP |
| 2541 | ATF7IP_9 | TTTYVVNNGLTLGSTGPQLTVHHRPPQVHTEPPRPV |
| | | HPAPLPEAPQPQRLPPEAASTSLPQK |
| | RNF217 | APASEQLSPPASPPGAPPVLNPPSTRSSFPSPRLSLPT |
| | | DSLSPDGGSIELEFYLAPEPFSMP |
| | ZNF831 | REAPWDSAPMASPGLPAASTQPWRKLPEQKSPTAG |
| | | KPCALQRQQATAAEKPWDAKAPEGRLR |
| 2542 | ITPKB | QPPEALVERQGQFLGSETSPAPERGGPRDGEPPGKM |
| | | GKGYLPCGMPGSGEPEVGKRPEETTV |
| 2543 | MAGE-like | MNNSVACSAFTVWCSHHRCLLPNRFIPPRGDPMCII |
| | | PPRGDPMCIIPPRGDPMWIITPRGDP |
| 2544 | MAGE-like | TVWCSHHRCLLPNRFIPPRGDPMCIIPPRGDPMCIIPP |
| | | RGDPMWIITPRGDPMCIIPPRGDP |
| 2545 | MAGE-like | LPNRFIPPRGDPMCIIPPRGDPMCIIPPRGDPMWIITPR |
| | | GDPMCIIPPRGDPMWIIPPRGDP |
| 2546 | MAGE-like | DPMCIIPPRGDPMCIIPPRGDPMWIITPRGDPMCIIPPR |
| | | GDPMWIIPPRGDPMCIIPPRGDP |
| 2547 | MAGE-like | DPMCIIPPRGDPMWIITPRGDPMCIIPPRGDPMWIIPP |
| | | RGDPMCIIPPRGDPMCIIPPRGDP |
| 2548 | MAGE-like | DPMWIITPRGDPMCIIPPRGDPMWIIPPRGDPMCIIPP |
| | | RGDPMCIIPPRGDPMCIIPPRGDP |
| 2549 | MAGE-like | DPMCIIPPRGDPMWIIPPRGDPMCIIPPRGDPMCIIPPR |
| | | GDPMCIIPPRGDPMCIIPPRGDP |
| 2550 | MAGE-like | DPMWIIPPRGDPMCIIPPRGDPMCIIPPRGDPMCIIPPR |
| | | GDPMCIIPPRGDPMCIIPPRGDP |
| 2551 | MAGE-like | DPMCIIPPRGDPMCIIPPRGDPMCIIPPRGDPMCIIPPR |
| | | GDPMCIIPPRGDPMCIIPPRGDP |
| 2552 | MAGE-like | DPMCIIPPRGDPMCIIPPRGDPMCIIPPRGDPMCIIPPR |
| | | GDPMCIIPPRGDPMCIIPPRGDP |
| 2553 | MAGE-like | DPMCIIPPRGDPMCIIPPRGDPMCIIPPRGDPMCIIPPR |
| | | GDPMCIIPPRGDPMCIIPPRGDP |
| 2554 | MAGE-like | DPMCIIPPRGDPMCIIPPRGDPMCIIPPRGDPMCIIPPR |
| | | GDPMCIIPPRGDPMCIIPPRGDP |
| 2555 | MAGE-like | DPMCIIPPRGDPMCIIPPRGDPMCIIPPRGDPMCIIPPR |
| | | GDPMCIIPPRGDPMCIIPPRGDP |
| 2556 | MAGE-like | DPMCIIPPRGDPMCIIPPRGDPMCIIPPRGDPMCIIPPR |
| | | GDPMCIIPPRGDPMCIIPPRGDP |
| 2557 | MAGE-like | DPMCIIPPRGDPMCIIPPRGDPMCIIPPRGDPMCIIPPR |
| | | GDPMCIIPPRGDPMCIIPPRGDP |
| 2558 | MAGE-like | DPMCIIPPRGDPMCIIPPRGDPMCIIPPRGDPMCIIPPR |
| | | GDPMCIIPPRGDPMCIIPPRGDP |
| 2559 | MAGE-like | DPMCIIPPRGDPMCIIPPRGDPMCIIPPRGDPMCIIPPR |
| | | GDPMCIIPPRGDPMCIIPPRGDP |
| 2560 | MAGE-like | DPMCIIPPRGDPMCIIPPRGDPMCIIPPRGDPMCIIPPR |
| | | GDPMCIIPPRGDPMCIIPPRGDP |
| 2561 | MAGE-like | DPMCIIPPRGDPMCIIPPRGDPMCIIPPRGDPMCIIPPR |
| | | GDPMCIIPPRGDPMCIIPPRGDP |
| 2562 | MAGE-like | DPMCIIPPRGDPMCIIPPRGDPMCIIPPRGDPMCIIPPR |
| | | GDPMCIIPPRGDPMWIIPPRGDP |
| 2563 | MAGE-like | DPMCIIPPRGDPMCIIPPRGDPMCIIPPRGDPMCIIPPR |
| | | GDPMWIIPPRGDPMWIIPPRGDP |
| 2564 | MAGE-like | DPMCIIPPRGDPMCIIPPRGDPMCIIPPRGDPMWIIPPR |
| | | GDPMWIIPPRGDPMCIIPPRGDP |
| 2565 | MAGE-like | DPMCIIPPRGDPMCIIPPRGDPMWIIPPRGDPMWIIPP |
| | | RGDPMCIIPPRGDPMCIIPPRGDP |
| 2566 | MAGE-like | DPMCIIPPRGDPMWIIPPRGDPMWIIPPRGDPMCIIPP |
| | | RGDPMCIIPPRGDPMCIIPPRGDP |
| 2567 | MAGE-like | DPMWIIPPRGDPMWIIPPRGDPMCIIPPRGDPMCIIPP |
| | | RGDPMCIIPPRGDPMCIIPPRGDP |
| 2568 | MAGE-like | DPMWIIPPRGDPMCIIPPRGDPMCIIPPRGDPMCIIPPR |
| | | GDPMCIIPPRGDPMCIIPPRGDP |
| 2569 | MAGE-like | DPMCIIPPRGDPMCIIPPRGDPMCIIPPRGDPMCIIPPR |
| | | GDPMCIIPPRGDPMCIIPPRGDP |
| 2570 | MAGE-like | DPMCIIPPRGDPMCIIPPRGDPMCIIPPRGDPMCIIPPR |
| | | GDPMCIIPPRGDPMCIIPPRGDP |
| 2571 | MAGE-like | DPMCIIPPRGDPMCIIPPRGDPMCIIPPRGDPMCIIPPR |
| | | GDPMCIIPPRGDPMCIIPPRGDP |
| 2572 | MAGE-like | DPMCIIPPRGDPMCIIPPRGDPMCIIPPRGDPMCIIPPR |
| | | GDPMCIIPPRGDPMCIIPPRGDP |
| 2573 | MAGE-like | DPMCIIPPRGDPMCIIPPRGDPMCIIPPRGDPMCIIPPR |
| | | GDPMCIIPPRGDPMCIIPPRGDP |
| 2574 | MAGE-like | DPMCIIPPRGDPMCIIPPRGDPMCIIPPRGDPMCIIPPR |
| | | GDPMCIIPPRGDPMCIIPPRGDP |
| | CBSL | PEDKEAKEPLWIRPDAPSRCTWQLGRPASESPHHHT |
| | | APAKSPKILPDILKKIGDTPMVRINK |
| 2575 | FBN1 | PPVLPVPPGFPPGPQIPVPRPPVEYLYPSREPPRVLPV |
| | | NVTDYCQLVRYLCQNGRCIPTPGS |
| | INPP5E_0 | PPEGRTLQGQLPGAPPAQRAGSPPDAPGSESPALAC |
| | | STPATPSGEDPPARAAPIAPRPPARP |
| | INPP5E_1 | LPGAPPAQRAGSPPDAPGSESPALACSTPATPSGEDP |
| | | PARAAPIAPRPPARPRLERALSLDD |
| 2576 | INPP5E_2 | PAQRAGSPPDAPGSESPALACSTPATPSGEDPPARAA |
| | | PIAPRPPARPRLERALSLDDKGWRR |
| | PEX1_0 | HLGKVWIPDDLRKRLNIEMHAVVRITPVEVTPKIPR |
| | | SLKLQPRENLPKDISEEDIKTVFYSW |
| 2577 | PEX1_1 | VVNQLLTQLDGVEGLQGVYVLAATSRPDLIDPALL |
| | | RPGRLDKCVYCPPPDQVSRLEILNVLS |
| | CAPRIN2 | EEQKKQETPKLWPVQLQKEQDPKKQTPKSWTPSM |
| | | QSEQNTTKSWTTPMCEEQDSKQPETPKS |
| | CBX4 | RCLSETHGEREPCKKRLTARSISTPTCLGGSPAAERP |
| | | ADLPPAAALPQPEVILLDSDLDEPI |
| | XDH | GDGNNPNCCMNQKKDHSVSLSPSLFKPEEFTPLDPT |
| | | QEPIFPPELLRLKDTPRKQLRFEGER |
| | EPAS1_0 | ATELRSHSTQSEAGSLPAFTVPQAAAPGSTTPSATSS |
| | | SSSCSTPNSPEDYYTSLDNDLKIEV |
| | EPAS1_1 | VPNDKFTQNPMRGLGHPLRHLPLPQPPSAISPGENS |
| | | KSRFPPQCYATQYQDYSLSSAHKVSG |
| | SHANK3_0 | GLVPPPEEFANGVLLATPLAGPGPSPTTVPSPASGKP |
| | | SSEPPPAPESAADSGVEEADTRSSS |
| | SHANK3_1 | GELTDTHTSFADGHTFLLEKPPVPPKPKLKSPLGKGP |
| | | VTFRDPLLKQSSDSELMAQQHHAAS |
| | ATF6 | PSAQPVLAVAGGVTQLPNHVVNVVPAPSANSPVNG |
| | | KLSVTKPVLQSTMRNVGSDIAVLRRQQ |
| | BCOR | KASNPEPSFKANENGLPPSSIFLSPNEAFRSPPIPYPRS |
| | | YLPYPAPEGIAVSPLSLHGKGPV |
| 2578 | CHD5 | PVPASPAHLLPAPLGLPDKMEAQLGYMDEKDPGAQ |
| | | KPRQPLEVQALPAALDRVESEDKHESP |
| | CCP110 | SDERGAHIMNSTCAAMPKLHEPYASSQCIASPNFGT |
| | | VSGLKPASMLEKNCSLQTELNKSYDV |
| 2579 | MMP9_0 | LMYPMYRFTEGPPLHKDDVNGIRHLYGPRPEPEPRP |
| | | PTTTTPQPTAPPTVCPTGPPTVHPSE |
| | MMP9_1 | GPPLHKDDVNGIRHLYGPRPEPEPRPPTTTTPQPTAP |
| | | PTVCPTGPPTVHPSERPTAGPTGPP |
| | BCL11B_0 | LNPMAIDSPAMDFSRRLRELAGNSSTPPPVSPGRGN |
| | | PMHRLLNPFQPSPKSPFLSTPPLPPM |
| | BCL11B_1 | AGNSSTPPPVSPGRGNPMHRLLNPFQPSPKSPFLSTP |
| | | PLPPMPPGGTPPPQPPAKSKSCEFC |
| | BCL11B_2 | TPPPVSPGRGNPMHRLLNPFQPSPKSPFLSTPPLPPMP |
| | | PGGTPPPQPPAKSKSCEFCGKTFK |
| | BCL11B_3 | PMHRLLNPFQPSPKSPFLSTPPLPPMPPGGTPPPQPPA |
| | | KSKSCEFCGKTFKFQSNLIVHRRS |
| | RB1 | DSIIVFYNSVFMQRLKTNILQYASTRPPTLSPIPHIPRS |
| | | PYKFPSSPLRIPGGNIYISPLKS |
| | AHSG_0 | GAEVAVTCMVFQTQPVSSQPQPEGANEAVPTPVVD |
| | | PDAPPSPPLGAPGLPPAGSPPDSHVLL |
| | AHSG_1 | GANEAVPTPVVDPDAPPSPPLGAPGLPPAGSPPDSH |
| | | VLLAAPPGHQLHRAHYDLRHTFMGVV |
| | TCTN3 | TDGGTLQSPSEATATRPAVPGLPTVVPTLVTPSAPG |
| | | NRTVDLFPVLPICVCDLTPGACDINC |
| | NR2F2 | QDEVPGSQGSQASQAPPVPGPPPGAPHTPQTPGQGG |
| | | PASTPAQTAAGGQGGPGGPGSDKQQQ |
| | KHDRBS1 | PSVRQTPSRQPPLPHRSRGGGGGSRGGARASPATQP |
| | | PPLLPPSATGPDATVGGPAPTPLLPP |
| | ARRB1 | SSDVAVELPFTLMHPKPKEEPPHREVPENETPVDTN |
| | | LIELDTNDDDIVFEDFARQRLKGMKD |
| | TFAP2B | HDGVPSHSSRLSQLGSVSQGPYSSAPPLSHTPSSDFQ |
| | | PPYFPPPYQPLPYHQSQDPYSHVND |
| 2580 | ASPH | DVDDAKVLLGLKERSTSEPAVPPEEAEPHTEPEEQV |
| | | PVEAEPQNIEDEAKEQIQSLLHEMVH |
| | KSR2_0 | IQWPTTETGKENNPVCPPEPTPWIRTHLSQSPRVPSK |
| | | CVQHYCHTSPTPGAPVYTHVDRLTV |
| | KSR2_1 | RSLPPSPRQRHAVRTPPRTPNIVTTVTPPGTPPMRKK |
| | | NKLKPPGTPPPSSRKLIHLIPGFTA |
| | KSR2_2 | RQQKNFNLPASHYYKYKQQFIFPDVVPVPETPTRAP |
| | | QVILHPVTSNPILEGNPLLQIEVEPT |
| | TNS1_0 | SGYIPSGHSLGTPEPAPRASLESVPPGRSYSPYDYQP |
| | | CLAGPNQDFHSKSPASSSLPAFLPT |
| | TNS1_1 | LPAFLPTTHSPPGPQQPPASLPGLTAQPLLSPKEATS |
| | | DPSRTPEEEPLNLEGLVAHRVAGVQ |
| | TNS1_2 | SASGYQAPSTPSFPVSPAYYPGLSSPATSPSPDSAAF |
| | | RQGSPTPALPEKRRMSVGDRAGSLP |
| | ZEB2 | SNSRSPSLERSSKPLAPNSNPPTKDSLLPRSPVKPMD |
| | | SITSPSIAELHNSVTNCDPPLRLTK |
| | CREBBP_0 | QGQVPGAALPNPLNMLGPQASQLPCPPVTQSPLHPT |
| | | PPPASTAAGMPSLQHTTPPGMTPPQP |
| | CREBBP_1 | GAALPNPLNMLGPQASQLPCPPVTQSPLHPTPPPAST |
| | | AAGMPSLQHTTPPGMTPPQPAAPTQ |
| | CREBBP_2 | AQLMRRRMATMNTRNVPQQSLPSPTSAPPGTPTQQ |
| | | PSTPQTPQPPAQPQPSPVSMSPAGFPS |
| | CREBBP_3 | MATMNTRNVPQQSLPSPTSAPPGTPTQQPSTPQTPQ |
| | | PPAQPQPSPVSMSPAGFPSVARTQPP |
| | CREBBP_4 | MNTRNVPQQSLPSPTSAPPGTPTQQPSTPQTPQPPAQ |
| | | PQPSPVSMSPAGFPSVARTQPPTTV |
| | CREBBP_5 | GQQIATSLSNQVRSPAPVQSPRPQSQPPHSSPSPRIQP |
| | | QPSPHHVSPQTGSPHPGLAVTMAS |
| | CREBBP_6 | QVRSPAPVQSPRPQSQPPHSSPSPRIQPQPSPHHVSPQ |
| | | TGSPHPGLAVTMASSIDQGHLGNP |
| | CREBBP_7 | APVQSPRPQSQPPHSSPSPRIQPQPSPHHVSPQTGSPH |
| | | PGLAVTMASSIDQGHLGNPEQSAM |
| 2581 | ARHGEF10L | SAALGVPSLAPERDTDPPLIHLDSIPVTDPDPAAAPP |
| | | GTGVPAWVSNGDAADAAFSGARHSS |
| 2582 | KAT8 | EGEPGPGENAAAEGTAPSPGRVSPPTPARGEPEVTV |
| | | EIGETYLCRRPDSTWHSAEVIQSRVN |
| 2583 | GBF1_0 | PSALWEITWERIDCFLPHLRDELFKQTVIQDPMPME |
| | | PQGQKPLASAHLTSAAGDTRTPGHPP |
| | GBF1_1 | IPSELGACDFEKPESPRAASSSSPGSPVASSPSRLSPTP |
| | | DGPPPLAQPPLILQPLASPLQVG |
| | GBF1_2 | GACDFEKPESPRAASSSSPGSPVASSPSRLSPTPDGPP |
| | | PLAQPPLILQPLASPLQVGVPPMT |
| | GBF1_3 | CDFEKPESPRAASSSSPGSPVASSPSRLSPTPDGPPPL |
| | | AQPPLILQPLASPLQVGVPPMTLP |
| | ESRP2 | QATPTLIPTETAALYPSSALLPAARVPAAPTPVAYYP |
| | | GPATQLYLNYTAYYPSPPVSPTTVG |
| | FGFR1 | PYWTSPEKMEKKLHAVPAAKTVKFKCPSSGTPNPT |
| | | LRWLKNGKEFKPDHRIGGYKVRYATWS |
| | FNDC1_0 | IVAMPTTSKADVEQNTEDNGKPEKPEPSSPSPRAPAS |
| | | SQHPSVPASPQGRNAKDLLLDLKNK |
| 2584 | FNDC1_1 | GHAASPARPSRPGGPQSRARVPSRAAPGKSEPPSKR |
| | | PLSSKSQQSVSAEDDEEEDAGFFKGG |
| | LCAT | PWQWVTLLLGLLLPPAAPFWLLNVLFPPHTTPKAEL |
| | | SNHTRPVILVPGCLGNQLEAKLDKPD |
| 2585 | COL4A5_0 | RSGVPGLKGDDGLQGQPGLPGPTGEKGSKGEPGLP |
| | | GPPGPMDPNLLGSKGEKGEPGLPGIPG |
| 2586 | COL4A5_1 | LLGSKGEKGEPGLPGIPGVSGPKGYQGLPGDPGQPG |
| | | LSGQPGLPGPPGPKGNPGLPGQPGLI |
| | COL4A5_2 | IKGSVGDPGLPGLPGTPGAKGQPGLPGFPGTPGPPGP |
| | | KGISGPPGNPGLPGEPGPVGGGGHP |
| | FGD1 | PGQSLEPHPEGPQRLRSDPGPPTETPSQRPSPLKRAP |
| | | GPKPQVPPKPSYLQMPRMPPPLEPI |
| | PIK3R1 | IGWLNGYNETTGERGDFPGTYVEYIGRKKISPPTPKP |
| | | RPPRPLPVAPGSSKTEADVEQQALT |
| 2587 | RELA | TGPGWEARGSFSQADVHRQVAIVFRTPPYADPSLQ |
| | | APVRVSMQLRRPSDRELSEPMEFQYLP |
| | EP300_0 | MQIQRAAETQRQMAHVQIFQRPIQHQMPPMTPMAP |
| | | MGMNPPPMTRGPSGHLEPGMGPTGMQQ |
| | EP300_1 | GQQIPNSLSNQVRSPQPVPSPRPQSQPPHSSPSPRMQ |
| | | PQPSPHHVSPQTSSPHPGLVAAQAN |
| | EP300_2 | QVRSPQPVPSPRPQSQPPHSSPSPRMQPQPSPHHVSP |
| | | QTSSPHPGLVAAQANPMEQGHFASP |
| | EP300_3 | QPVPSPRPQSQPPHSSPSPRMQPQPSPHHVSPQTSSP |
| | | HPGLVAAQANPMEQGHFASPDQNSM |
| 2588 | FEN1 | SIEEIVRRLDPNKYPVPENWLHKEAHQLFLEPEVLDP |
| | | ESVELKWSEPNEEELIKFMCGEKQF |
| | FOXM1_0 | VGGLDFSPVQTSQGASDPLPDPLGLMDLSTTPLQSA |
| | | PPLESPQRLLSSEPLDLISVPFGNSS |
| | FOXM1_1 | TSQGASDPLPDPLGLMDLSTTPLQSAPPLESPQRLLS |
| | | SEPLDLISVPFGNSSPSDIDVPKPG |
| | ACD | ICSAPATLTPRSPHASRTPSSPLQSCTPSLSPRSHVPSP |
| | | HQALVTRPQKPSLEFKEFVGLPC |
| 2589 | SON_0 | DSYTDTYTEAYMVPPLPPEEPPTMPPLPPEEPPMTPP |
| | | LPPEEPPEGPALPTEQSALTAENTW |
| | SON_1 | SETAETFDSMRASGHVASEVSTSLLVPAVTTPVLAE |
| | | SILEPPAMAAPESSAMAVLESSAVTV |
| | HTT_0 | INICAHVLDDVAPGPAIKAALPSLTNPPSLSPIRRKGK |
| | | EKEPGEQASVPLSPKKGSEASAAS |
| 2590 | HTT_1 | VAPGPAIKAALPSLTNPPSLSPIRRKGKEKEPGEQAS |
| | | VPLSPKKGSEASAASRQSDTSGPVT |
| | PHLPP1 | APGAFGGPPRAPPADLPLPVGGPGGWSRRASPAPSD |
| | | SSPGEPFVGGPVSSPRAPRPVVSDTE |
| | NAF1 | DFGVGEGPAAPSPGSAPVPGTQPPLQSFEGSPDAGQ |
| | | TVEVKPAGEQPLQPVLNAVAAGTPAP |
| | ERBB2 | PSETDGYVAPLTCSPQPEYVNQPDVRPQPPSPREGPL |
| | | PAARPAGATLERPKTLSPGKNGVVK |
| 2591 | DAZAP1_0 | RGFGFVKFKDPNCVGTVLASRPHTLDGRNIDPKPCT |
| | | PRGMQPERTRPKEGWQKGPRSDNSKS |
| | DAZAP1_1 | VKFKDPNCVGTVLASRPHTLDGRNIDPKPCTPRGM |
| | | QPERTRPKEGWQKGPRSDNSKSNKIFV |
| 2592 | SMAD3 | PRHTEIPAEFPPLDDYSHSIPENTNFPAGIEPQSNIPET |
| | | PPPGYLSEDGETSDHQMNHSMDA |
| | E2F8 | VAPLDPPVNAEMELTAPSLIQPLGMVPLIPSPLSSAV |
| | | PLILPQAPSGPSYAIYLQPTQAHQS |
| 2593 | SQSTM1 | WTHLSSKEVDPSTGELQSLQMPESEGPSSLDPSQEG |
| | | PTGLKEAALYPHLPPEADPRLIESLS |
| | PC_0 | RPAQNRAQKLLHYLGHVMVNGPTTPIPVKASPSPTD |
| | | PVVPAVPIGPPPAGFRDILLREGPEG |
| 2594 | PC_1 | RAQKLLHYLGHVMVNGPTTPIPVKASPSPTDPVVPA |
| | | VPIGPPPAGFRDILLREGPEGFARAV |
| | TMIGD2 | QSIYSTSFPQPAPRQPHLASRPCPSPRPCPSPRPGHPV |
| | | SMVRVSPRPSPTQQPRPKGFPKVG |
| | MAPT_0 | PAKTPPAPKTPPSSGEPPKSGDRSGYSSPGSPGTPGS |
| | | RSRTPSLPTPPTREPKKVAVVRTPP |
| | MAPT_1 | PPSSGEPPKSGDRSGYSSPGSPGTPGSRSRTPSLPTPP |
| | | TREPKKVAVVRTPPKSPSSAKSRL |
| | MAPT_2 | EPPKSGDRSGYSSPGSPGTPGSRSRTPSLPTPPTREPK |
| | | KVAVVRTPPKSPSSAKSRLQTAPV |
| 2595 | MAPT_3 | GDRSGYSSPGSPGTPGSRSRTPSLPTPPTREPKKVAV |
| | | VRTPPKSPSSAKSRLQTAPVPMPDL |
| | KCNQ2_0 | LIPPLNQLELLRNLKSKSGLAFRKDPPPEPSPSKGSPC |
| | | RGPLCGCCPGRSSQKVSLKDRVFS |
| | KCNQ2_1 | NQLELLRNLKSKSGLAFRKDPPPEPSPSKGSPCRGPL |
| | | CGCCPGRSSQKVSLKDRVFSSPRGV |
| | MBNL2 | SFAPYLAPVTPGVGLVPTEILPTTPVIVPGSPPVTVPG |
| | | STATQKLLRTDKLEVCREFQRGNC |
| 2593 | SCARA3 | LRGAPGPPGPRGFKGDMGVKGPVGGRGPKGDPGSL |
| | | GPLGPQGPQGQPGEAGPVGERGPVGPR |
| | FN1 | PGTSGQQPSVGQQMIFEEHGFRRTTPPTTATPIRHRP |
| | | RPYPPNVGEEIQIGHIPREDVDYHL |
| | KLF5_0 | TAVKQFQGMPPCTYTMPSQFLPQQATYFPPSPPSSEP |
| | | GSPDRQAEMLQNLTPPPSYAATIAS |
| 2597 | KLF5_1 | FQGMPPCTYTMPSQFLPQQATYFPPSPPSSEPGSPDR |
| | | QAEMLQNLTPPPSYAATIASKLAIH |
| | uncharacterized_ | VIRALGPLVPPTEGGLWSDQVSWPLWEDVKTPEPG |
| | LOC101060588_0 | EPGSPLPASPHPPLQPPAFPDPPIRSP |
| 2598 | uncharacterized_ | GPLVPPTEGGLWSDQVSWPLWEDVKTPEPGEPGSP |
| | LOC101060588_1 | LPASPHPPLQPPAFPDPPIRSPDPAVS |
| 2599 | uncharacterized | WEDVKTPEPGEPGSPLPASPHPPLQPPAFPDPPIRSPD |
| | LOC101060588_2 | PAVSSAHSFPAPRLAWSCVLHSPL |
| | uncharacterized_ | TPEPGEPGSPLPASPHPPLQPPAFPDPPIRSPDPAVSSA |
| | LOC101060588_3 | HSFPAPRLAWSCVLHSPLSLPLS |
| | translation_initiation_ | PGSLLPTPASLWQAQCPRHMHSWSSAPGRLTPHPPG |
| | factor_IF-2-like | PAPGTKLATGATSSACSRPQGRPCPQ |
| | putative_uncharacterized | SAQAGPPETAHAADPQPRGPQAPPRLPPSLSPERVHP |
| | protein_MGC34800 | GQPAAPAEPAPGAPALRSGPSQPRG |
| | uncharacterized_ | SLPWPLRAAPLYAGRSGQGGEPGARAPRQGTPEPG |
| | LOC100507221 | ELDQERPPAPPEQGRRAAAAVAKSGGG |
| 2600 | basic_proline- | KEPAQATRPPRTPLRPPGLLGPRSGHPASSDPAQATR |
| | rich_protein-like_0 | PPRTPQNTPKAHGRLLTVRTGWESF |
| | basic_proline- | SAGNKENARTWRRSEGGLAGPPLAKAPRSHSPPGC |
| | rich_protein-like_1 | SPHGQSLPPRRRTPPSQLTGSARSRRP |
| | basic_proline- | ENARTWRRSEGGLAGPPLAKAPRSHSPPGCSPHGQS |
| | rich_protein-like_2 | LPPRRRTPPSQLTGSARSRRPGSPFR |
| | basic_proline- | RSPGAGGVQGGGAGGIPAPRAPRPPPSGAPSPTHVE |
| | rich_protein-like_3 | PPRPRRPAPTREGTRASPHTRASRSR |
| | uncharacterized_ | CWDSHLPFRKKGAAPAPGCGDRIDTVPTSATPNGRT |
| | LOC107987269 | PGRGALLAAPILSQPCHFQSCQHPSQ |
| | sine oculis- | GCLSKGSQRSLTPSWSPSVSPGSEADSSWGTPSTPPR |
| | binding protein_ | PHSPPSLPRPSPSPWVQARPGIPPP |
| | homolog_0 | |
| | sine_oculis- | SPGSEADSSWGTPSTPPRPHSPPSLPRPSPSPWVQAR |
| | binding_protein_ | PGIPPPSEQTLFKGLWRLEGIEPPP |
| | homolog_1 | |
| 2601 | uncharacterized_ | LAMLLGRAVGTRVGQAPCPALGLSFFIDAAEPGGPP |
| | LOC107987285_0 | PELCIPLGVTHGRGQPLGHCAFTGDG |
| 2602 | uncharacterized_ | LSAAVVFHRLTEAGLTRAEIHPSVYSPTSFEPQPTQT |
| | LOC107987285_1 | HGGGTNALKPRAMIHNEDTEHFRHP |
| | mucin-1-like_0 | PAGSPAAPLQTATSVPPWVSSCTTSNCNISSPLGLQQ |
| | | HGPQPGTSAPPNPGLQLHSPQPGTS |
| | mucin-1-like_1 | NCNISSPLGLQQHGPQPGTSAPPNPGLQLHSPQPGTS |
| | | APPNPGLQLHGPQTGTSAPCRVSSC |

### Small Molecule Inhibitors

[0240] In some embodiments, the current invention provides an inhibitor of DNA-speckle association which is a small molecule that mimics the key chemistry of the peptide inhibitor. These features are determined based on the optimization of the speckle-targeting portion of the peptide inhibitor, and includes features that mimic the kinks that are a feature of Proline-containing peptides as well as the negatively charged components at particular locations of the molecule.

### Using the Speckle Signature as a Prognostic Tool

[0241] In some embodiments the speckle signature expressed by cells, including cancer cells, is used as a prognostic or diagnostic tool in order to determine patient prognosis, as well as to identify cancers which would benefit from treatments that alter speckle regulated gene expression such as the polypeptides and compositions of the present invention. The data disclosed herein indicate that speckle signature divides clear cell renal cell carcinoma and neuroblastoma patients into distinct subclasses that differ in survival rates, and in the key molecular features of clear cell renal cell carcinoma. The same speckle signature is present in 24 of the 30 adult cancer types examined, and predicted patient survival of other cancer types depending on mutation status, being predictive of survival in: melanoma with wild type KMT2D, thyroid cancer with wild type BRAF, endometrial cancer with mutant PIK3R1, and lung adenocarcinoma with mutant TTN. In the case of lung adenocarcinoma, splitting cancers by speckle signature enables prediction of patient survival based on p53 mutation status. Hence the speckle signature can be used in the clinic to identify high-risk patient groups and prioritize them for specific targeted therapies, including the polypeptides and compositions of the present invention, recently FDA-approved HIF2A inhibitors, tyrosine kinase inhibitors, immunotherapy, and any routinely used treatment employed in each respective cancer type.

[0242] Gene expression readouts of speckle signature: The speckle signature can be determined from genome-wide RNA expression data of groups of patient samples or from expression analysis of the minimal speckle signature, consisting of 18 speckle protein genes (FIBP, PQBP1, SART1, THRAP4, FASTK, C19ORF24, CDC34, FBXL4, WRN, RNF169, TRIP12, SON, RBM27, BCLAF1, PRPF4B, SETD2, RBM26, and EPC2). This minimal speckle signature represents the overlap between the 16 different cancer types, and is sufficient to separate tumor samples into the two speckle signature groups. Speckle gene expression from genome wide or the minimal speckle signature can then be used to generate a speckle score that provides a quantitative value to the speckle score, using the following method:
[0243] 1. Getting the Z-score of each speckle protein gene in a group of patients
[0244] 2. For each Signature I speckle protein gene, divide its Z-score by the number of speckle protein genes in speckle Signature I, then take the sum of all these values for Signature I speckle protein genes.
[0245] 3. For each Signature II speckle protein gene, divide its Z-score by the number of speckle protein genes in speckle Signature II, then take the sum of all these values for Signature II speckle protein genes.
[0246] 4. Take the log(2) of the ratio of the result from Step 2 to the result from Step 3. In the calculated speckle score, samples with high positive values are strongly Signature I and samples with low negative values are strongly Signature II.

[0247] Further development of gene expression readouts of speckle signature involves bioinformatic identification the minimal number of genes needed to assign a tumor sample to speckle Signature I or Signature II. This process incorporates gene expression read-outs of non-speckle protein genes that are highly correlated with the speckle score, including, but not limited to GADD45GIP1 (readout of Signature I) and LATS1 (readout of Signature II). Gene expression readouts of speckle signature can include RNA or protein measurements of gene expression.

### Readouts of Speckle Signature

[0248] In some embodiments, the current invention provides methods for determining the speckle signature of a particular tissue or tumor sample. The level of one or more speckle signature genes is measured in the sample. In some embodiments, the sample is a tissue sample that includes a tumor cell, for example, from a biopsy or formalin-fixed, paraffin-embedded (FFPE) sample. Exemplary test samples also include body fluids (e.g. blood, serum, plasma, amniotic fluid, sputum, urine, cerebrospinal fluid, lymph, tear fluid, feces, or gastric fluid), tissue extracts, and culture media (e.g., a liquid in which a cell, such as a pathogen cell, has been grown). If desired, the sample is purified prior to detection using any standard method typically used for isolating nucleic acid molecules from a biological sample.

[0249] In some embodiments, the expression levels of speckle signature genes are determined using imaging-based immunofluorescence methods of detecting speckle signature. Here, the expression of SON protein expression and location is assessed. SON is a speckle-associated protein that has been found to be required for speckle organization and structure. Visualization of SON protein enables the visualization of speckle structure and positioning within the nucleus. This method of visualization can be applied to FFPE tumor tissue sections, which are frequently collected in the clinic to assess tumor pathology. In some embodiments, the determination of speckle signature can be accomplished by means for analyzing multiple types of nucleic acids or proteins present in a sample, including DNA and RNA. In various embodiments, sample preparation involves extracting a mixture of nucleic acid molecules (e.g., DNA and RNA). In some embodiments, the radial position of speckles in the nucleus are correlated with speckle signature score. For example, more centralized speckle formation is associated with speckle signature II, and speckle signature II RNA expression patterns. Likewise, more diffuse or less centralized speckle expression correlates with speckle signature I and speckle signature I RNA expression patterns.

[0250] The expression levels of speckle signature genes can be detected by any suitable method. The methods described herein can be used individually or in combination for a more accurate detection of the speckle signature genes. Methods for conducting polynucleotide hybridization assays have been developed in the art. Hybridization assay procedures and conditions will vary depending on the application and are selected in accordance with the general binding methods known including those referred to in: Sambrook and Russell, Molecular Cloning: A Laboratory Manual (3^{rd} Ed. Cold Spring Harbor, N.Y, 2001); Berger and Kimmel Methods in Enzymology, Vol. 152, Guide to Molecular Cloning Techniques (Academic Press, Inc., San Diego, Calif., 1987); Young and Davism, P.N.A.S, 80: 1194 (1983). Methods and apparatus for carrying out repeated and controlled hybridization reactions have been described in U.S. Pat. Nos. 5,871,928, 5,874,219, 6,045,996 and 6,386,749, 6,391,623. A data analysis algorithm (E-predict) for interpreting the hybridization results from an array is publicly available (see Urisman, 2005, Genome Biol 6:R78).

[0251] The term “speckle signature” as used herein refers to the reproducible reciprocal expression pattern of nuclear speckle protein genes as determined by analysis of human tumor RNA-seq datasets.

[0252] The term “speckle signature I” refers to the speckle signature with generally higher levels, compared to the cohort average, of speckle protein genes: VAX2, JDP2, PLEKHN1, HDAC5, C11ORF49, SLC4A2, STYXL1, TMEM179B, TAB1, ZNF446, TBXA2R, UNC45A, PCBP1, PHLDB3, KTI12, AKAP17A, PRCC, ZNF821, SPINDOC, HSF4, DEXI, HEXIM2, EHMT2, VPS72, DDX39A, KIF22, DPCD, LHPP, CD2BP2, CDK11B, GTF2H4, DGKZ, SARNP, ALYREF, SLC2A4RG, TEPSIN, AKAP8L, PPIE, STK19, FIBP, C60RF226, H2AFX, EGFL8, PSMD13, CACTIN, EXOSC7, C120RF57, THAP4, TMEM259, THOC6, AP5Z1, PQBP1, RBM10, C1ORF35, C19ORF24, SART1, CDC34, FASTK, POMP, PRPF6, PRPF19, BRK1, UFC1, SNRPA1, ZCCHC17, SNRPB2, PCP2, SSH3, SETD1A, WDR90, THEM6, U2AF2, RBM14, MAST3, LIMK1, SF3B4, DDX39B, RTEL1, ZNF165, MAPK12, PSMD8, CDK5RAP1, PDZK1IP1, SETD4, CHTOP, CDK11A, SRSF4, TBX19, RTN2, CCDC32, CYSRT1, IQCK, MPP1, MAMSTR, ILRUN, DBNDD1, EPHB6, TCF15, C60RF52, CYGB, CCDC85C, PHYHD1, ITPKC, CDC25C, RMI2, SNRNP40, HISTIHIE, ZC3H18, and generally lower levels, compared to the cohort average, of speckle protein genes: SON, RBM27, TCF12, BCLAF1, ERBIN, SETD2, TCP11L2, EPC2, TRIP12, YLPM1, LMTK2, GPATCH8, DDX46, PRPF4B, TAB3, EPG5, RSBN1L, SF3B1, PUS7L, KCTD20, RBM26, BAZ2A, RBM41, RREB1, ZNF621, FAM160B1, CDK13, SDE2, DHX15, PRPF40A, CHIC1, SREK1, LIN52, BARD1, ZNF441, GNAQ, THRAP3, HBP1, SMC5, PPP4R3B, RBBP6, TTC26, COG6, ZC3H14, UBE3B, MRTFB, YTHDF3, UBE4A, CBLL1, API5, CMTR2, TBC1D12, WRN, KIAA1328, TMEM209, ZCCHC4, MAPK14, ZNF160, SLU7, ERCC8, FOXJ3, PCLO, RSRC1, ZC3H11A, BMP2K, RALGAPB, FBXL4, RTL6, RCAN3, FBXO34, ZBTB8A, CWF19L2, SRRM2, HELQ, FYTTD1, PPIG, ANKRD44, SOCS6, S100PBP, ZNF304, ZNF543, RBM25, EFCAB13, CPD, ARMCX5, POLI, ZNF551, MAML3, POLR3B, SFMBT2, DDX17, RNF169, KAT6A, DDX42, GPATCH2, CBFA2T2, E2F3, ZNF169, TAF5L, KIAA0100, PRKAA1, LHX4, RSRC2, CSRNP2, NCBP3, NCAPG2, SF3A1, DENND1B, BRD2, PNISR, E2F7, LRRC8B, PACSIN2, PNN, KIAA0556, SAP130, CPSF6, MAP3K7, TADA2A, HP1BP3, ZNF217, BRD1, SRRM1, SRSF11, GLYR1, FAM227B, AAGAB, PLRG1, FCHSD2, MECOM, TMEM56, CDYL, ELOA, STK17A, RIOK1, ARHGAP42, R3HCC1L, COPS4, BORCS7, THOC1, CIR1, PYROXD1, ARHGAP18, NSL1, WTAP, ZNHIT6, BCAS2, HAUS6, MORF4L1, SMC4, MBD4, PRPF18, CWC22, UBAP2L, SMURF2, KDM6B, PRKAA2, LIFR, RBM8A, SNURF, DAZAP2, FAM120C, WDR17, ZDHHC15, GTF2H2C, SRGAP1, ZSWIM5, RAF1, ZNF286B, ZNF528, ZNF572, ZNF527, XYLB, FNBP4, PRPF4, SIPA1L3, ZNF382, RFXAP, RBM39, CWC25, ZIM2, ANXA9, MFSD11, BPNT1, GPN3, MAPT, PPP1R16B, ZNF250, RAD52, ZNF786, GNB5, MNS1, TARBP1, RBM6, PRKN, ZCWPW2, MAMDC2, IPCEF1, NFATC4, LPAR1, VXN, FAM107A, IL16, USP22, RNF112, CRY2, PLAGI, IQUB, PPP1R8, BNIP3L, or any combination thereof. Not all of the speckle protein genes will be expressed, and not all of them will completely fit in with the rest of the signature. The speckle signature rather refers to the general pattern of expression of the group of speckle protein genes, as can be observed. speckle signature I, as defined herein, is the reciprocal of speckle signature II.

[0253] The term “speckle signature II” refers to the speckle signature with generally higher levels, compared to the cohort average, of speckle protein genes: SON, RBM27, TCF12, BCLAF1, ERBIN, SETD2, TCP11L2, EPC2, TRIP12, YLPM1, LMTK2, GPATCH8, DDX46, PRPF4B, TAB3, EPG5, RSBN1L, SF3B1, PUS7L, KCTD20, RBM26, BAZ2A, RBM41, RREB1, ZNF621, FAM160B1, CDK13, SDE2, DHX15, PRPF40A, CHIC1, SREK1, LIN52, BARD1, ZNF441, GNAQ, THRAP3, HBP1, SMC5, PPP4R3B, RBBP6, TTC26, COG6, ZC3H14, UBE3B, MRTFB, YTHDF3, UBE4A, CBLL1, API5, CMTR2, TBC1D12, WRN, KIAA1328, TMEM209, ZCCHC4, MAPK14, ZNF160, SLU7, ERCC8, FOXJ3, PCLO, RSRC1, ZC3H11A, BMP2K, RALGAPB, FBXL4, RTL6, RCAN3, FBXO34, ZBTB8A, CWF19L2, SRRM2, HELQ, FYTTD1, PPIG, ANKRD44, SOCS6, S100PBP, ZNF304, ZNF543, RBM25, EFCAB13, CPD, ARMCX5, POLI, ZNF551, MAML3, POLR3B, SFMBT2, DDX17, RNF169, KAT6A, DDX42, GPATCH2, CBFA2T2, E2F3, ZNF169, TAF5L, KIAA0100, PRKAA1, LHX4, RSRC2, CSRNP2, NCBP3, NCAPG2, SF3A1, DENND1B, BRD2, PNISR, E2F7, LRRC8B, PACSIN2, PNN, KIAA0556, SAP130, CPSF6, MAP3K7, TADA2A, HP1BP3, ZNF217, BRD1, SRRM1, SRSF11, GLYR1, FAM227B, AAGAB, PLRG1, FCHSD2, MECOM, TMEM56, CDYL, ELOA, STK17A, RIOK1, ARHGAP42, R3HCC1L, COPS4, BORCS7, THOC1, CIR1, PYROXD1, ARHGAP18, NSL1, WTAP, ZNHIT6, BCAS2, HAUS6, MORF4L1, SMC4, MBD4, PRPF18, CWC22, UBAP2L, SMURF2, KDM6B, PRKAA2, LIFR, RBM8A, SNURF, DAZAP2, FAM120C, WDR17, ZDHHC15, GTF2H2C, SRGAP1, ZSWIM5, RAF1, ZNF286B, ZNF528, ZNF572, ZNF527, XYLB, FNBP4, PRPF4, SIPA1L3, ZNF382, RFXAP, RBM39, CWC25, ZIM2, ANXA9, MFSD11, BPNT1, GPN3, MAPT, PPP1R16B, ZNF250, RAD52, ZNF786, GNB5, MNS1, TARBP1, RBM6, PRKN, ZCWPW2, MAMDC2, IPCEF1, NFATC4, LPAR1, VXN, FAM107A, IL16, USP22, RNF112, CRY2, PLAGI, IQUB, PPP1R8, BNIP3L, and generally lower levels, compared to the cohort average, of speckle protein genes: VAX2, JDP2, PLEKHN1, HDAC5, C11ORF49, SLC4A2, STYXL1, TMEM179B, TAB1, ZNF446, TBXA2R, UNC45A, PCBP1, PHLDB3, KTIl2, AKAP17A, PRCC, ZNF821, SPINDOC, HSF4, DEXI, HEXIM2, EHMT2, VPS72, DDX39A, KIF22, DPCD, LHPP, CD2BP2, CDK11B, GTF2H4, DGKZ, SARNP, ALYREF, SLC2A4RG, TEPSIN, AKAP8L, PPIE, STK19, FIBP, C60RF226, H2AFX, EGFL8, PSMD13, CACTIN, EXOSC7, C120RF57, THAP4, TMEM259, THOC6, AP5Z1, PQBP1, RBM10, C1ORF35, C19ORF24, SART1, CDC34, FASTK, POMP, PRPF6, PRPF19, BRK1, UFC1, SNRPA1, ZCCHC17, SNRPB2, PCP2, SSH3, SETD1A, WDR90, THEM6, U2AF2, RBM14, MAST3, LIMK1, SF3B4, DDX39B, RTEL1, ZNF165, MAPK12, PSMD8, CDK5RAP1, PDZK1IP1, SETD4, CHTOP, CDK11A, SRSF4, TBX19, RTN2, CCDC32, CYSRT1, IQCK, MPP1, MAMSTR, ILRUN, DBNDD1, EPHB6, TCF15, C60RF52, CYGB, CCDC85C, PHYHD1, ITPKC, CDC25C, RMI2, SNRNP40, HISTIHIE, ZC3H18 or any combination thereof. Depending on the context, not all the speckle protein genes will be expressed, and not all of them will completely fit in with the rest of the signature. The speckle signature rather refers to the general pattern of expression of the group of speckle protein genes. speckle signature II, as defined herein, is the reciprocal of speckle signature I.

[0254] In some embodiments, the radial positioning of the speckle structures also correlates to speckle signature. In some embodiments, a SON signal being more central corresponds to the speckle Signature II RNA expression pattern; SON signal being less central corresponds to the Signature I RNA expression pattern, as per FIG. 52

### Methods

[0255] In some embodiments, the current invention provides a method for inhibiting transcription factor/DNA-speckle association in a cell, comprising contacting the cell with an effect amount of an inhibitor of transcription factor/DNA-speckle association. In some embodiments, the inhibitor is a polypeptide comprising a first polypeptide domain, a second polypeptide domain, and a third polypeptide domain, wherein the first polypeptide domain comprises a cell penetrating peptide, the second polypeptide domain comprises a linker region, and the third polypeptide domain comprises a DNA-speckle targeting motif. In some embodiments, the DNA-speckle targeting motif comprises an amino acid sequence set forth in any one of SEQ ID NOs: 1-2602. In some embodiments, the inhibitor is a small molecule. In some embodiments, the inhibitor is a combination of a small molecule and a polypeptide comprising one or more of the polypeptides set for in SEQ ID NOs: 1-2602.

[0256] In some embodiments, the invention includes a method of generating inhibitors of DNA speckle association, comprising screening a library of protein sequences for those comprising a DNA-speckle targeting motif as identified by the following rules:
[0257] 1. The sequence comprises the pattern X1(30)-X2-P-X1(30), wherein X1 is any amino acid and X2 is an amino acid selected from T, S, E, or D.
[0258] 2. The sequence may be the full 62 contiguous amino acid sequence, or truncated versions therein.
[0259] 3. The sequence does not comprise four or more consecutive proline residues.
[0260] 4. The sequence contains proline residues in a minimum of three of positions 16, 21, 36, 41, or 46.
[0261] 5. The sequence comprises at least five negative or phosphorylatable amino acids selected from the group consisting of D, E, T, and S.
[0262] 6. The sequence comprises at least five small or hydrophobic amino acids selected from the group consisting of A, M, V, F, L, and I.
[0263] 7. The sequence comprises fewer than fifteen positively charged amino acids selected from the group consisting of R, H, and K.

[0264] The protein sequences which comprise the DNA-speckle targeting motif are then synthesized as distinct inhibitor peptides, which can then be administered to a cell or a subject in need thereof to disrupt the target protein's association with DNA-speckles thereby achieving inhibition. In some embodiments, the inhibitor peptides are further modified by the addition of one or more cell-penetration sequences, which can include but are not limited to HIV TAT peptides, penetratin peptides, R8 peptides, transportan peptides, cyclic R8 peptides, cyclic TAT peptides, HA-TAT peptides, and xentry peptides among others. In some preferred embodiments, the cell-penetration peptide is an HIV-TAT peptide and comprises the amino acid sequence GRKKRRQRRRPQ (SEQ ID NO: 2603). In some embodiments, the inhibitor peptide is further modified with a nuclear localization sequence (NLS) which directs the peptide into the nucleus once it has crossed the plasma membrane into the cytosol of the target cell. In some embodiments, the inhibitor peptide further comprises a linker sequence between the cell-permeability sequence and the DNA-speckle motif sequence. In some embodiments, the linker comprises the amino acid sequence GGSGGGSG (SEQ ID NO: 2604). It is also contemplated that any GS-rich linker sequence known in the art may be used, and that the skilled artisan would be able to select an appropriate linker for use in the inhibitor peptides of the invention.

[0265] In some embodiments, the invention also includes a method for screening a tissue specimen in order to determine its speckle signature score. In some embodiments, the tissue specimen is cancer or tumor tissue from a subject or patient. In some embodiments, the determination of the Speckle signature score informs the use of DNA-speckle association inhibitors in order to alter the expression of speckle signature proteins in order to treat the cancer. Two speckle signatures are identified in the present disclosure, speckle Signature I and speckle signature II. The speckle signature score informs whether the gene expression pattern is primarily Signature I or Signature II. The expression of speckle Signature I correlates with poorer patient prognosis and shorter survival, and the inhibition of Signature I genes thus aids in treating the cancer. In some embodiments of the present invention, the method of determining the speckle signature score is accomplished by obtaining a specimen of tumor tissue, isolating and purifying RNA from the specimen, performing RNA-seq using the RNA to determine relative gene expression levels of speckle signature genes, and determining the Z-score of each speckle signature gene. For each speckle Signature I gene, its Z-score is divided by the number of speckle protein genes in speckle signature I, then the sum of all these values is determined for Signature I speckle protein genes. For each speckle Signature II gene, its Z-score is divided by the number of speckle protein genes in speckle signature II, then the sum of all these values is determined for Signature II speckle protein genes. Lastly, the log(2) of the ratio of the results from the previous two steps is calculated in order to determine the speckle signature score of the specimen. Samples with high positive values are strongly Signature I and samples with low negative values are strongly Signature II.

[0266] In some embodiments, the speckle signature comprises a minimal speckle signature, which comprises the genes FIBP, PQBP1, SART1, THRAP4, FASTK, C19ORF24, CDC34, FBXL4, WRN, RNF169, TRIP12, SON, RBM27, BCLAF1, PRPF4B, SETD2, RBM26, and EPC2. The minimal signature represents the smallest set of genes which can be used to separate tumor samples into Signature I or Signature II.

[0267] In some embodiments, the genes comprising speckle Signature I are selected from the group consisting of VAX2, JDP2, PLEKHN1, HDAC5, C11ORF49, SLC4A2, STYXL1, TMEM179B, TAB1, ZNF446, TBXA2R, UNC45A, PCBP1, PHLDB3, KTI12, AKAP17A, PRCC, ZNF821, SPINDOC, HSF4, DEXI, HEXIM2, EHMT2, VPS72, DDX39A, KIF22, DPCD, LHPP, CD2BP2, CDK11B, GTF2H4, DGKZ, SARNP, ALYREF, SLC2A4RG, TEPSIN, AKAP8L, PPIE, STK19, FIBP, C60RF226, H2AFX, EGFL8, PSMD13, CACTIN, EXOSC7, C120RF57, THAP4, TMEM259, THOC6, AP5Z1, PQBP1, RBM10, C1ORF35, C19ORF24, SART1, CDC34, FASTK, POMP, PRPF6, PRPF19, BRK1, UFC1, SNRPA1, ZCCHC17, SNRPB2, PCP2, SSH3, SETD1A, WDR90, THEM6, U2AF2, RBM14, MAST3, LIMK1, SF3B4, DDX39B, RTEL1, ZNF165, MAPK12, PSMD8, CDK5RAP1, PDZK1IP1, SETD4, CHTOP, CDK11A, SRSF4, TBX19, RTN2, CCDC32, CYSRT1, IQCK, MPP1, MAMSTR, ILRUN, DBNDD1, EPHB6, TCF15, C60RF52, CYGB, CCDC85C, PHYHD1, ITPKC, CDC25C, RMI2, SNRNP40, HISTIHIE, ZC3H18, SON, RBM27, TCF12, BCLAF1, ERBIN, SETD2, TCP1 IL2, EPC2, TRIP12, YLPM1, LMTK2, GPATCH8, DDX46, PRPF4B, TAB3, EPG5, RSBN1L, SF3B1, PUS7L, KCTD20, RBM26, BAZ2A, RBM41, RREB1, ZNF621, FAM160B1, CDK13, SDE2, DHX15, PRPF40A, CHIC1, SREK1, LIN52, BARD1, ZNF441, GNAQ, THRAP3, HBP1, SMC5, PPP4R3B, RBBP6, TTC26, COG6, ZC3H14, UBE3B, MRTFB, YTHDF3, UBE4A, CBLL1, API5, CMTR2, TBC1D12, WRN, KIAA1328, TMEM209, ZCCHC4, MAPK14, ZNF160, SLU7, ERCC8, FOXJ3, PCLO, RSRC1, ZC3H11A, BMP2K, RALGAPB, FBXL4, RTL6, RCAN3, FBXO34, ZBTB8A, CWF19L2, SRRM2, HELQ, FYTTD1, PPIG, ANKRD44, SOCS6, S100PBP, ZNF304, ZNF543, RBM25, EFCAB13, CPD, ARMCX5, POLI, ZNF551, MAML3, POLR3B, SFMBT2, DDX17, RNF169, KAT6A, DDX42, GPATCH2, CBFA2T2, E2F3, ZNF169, TAF5L, KIAA0100, PRKAA1, LHX4, RSRC2, CSRNP2, NCBP3, NCAPG2, SF3A1, DENND1B, BRD2, PNISR, E2F7, LRRC8B, PACSIN2, PNN, KIAA0556, SAP130, CPSF6, MAP3K7, TADA2A, HP1BP3, ZNF217, BRD1, SRRM1, SRSF11, GLYR1, FAM227B, AAGAB, PLRG1, FCHSD2, MECOM, TMEM56, CDYL, ELOA, STK17A, RIOK1, ARHGAP42, R3HCC1L, COPS4, BORCS7, THOC1, CIR1, PYROXD1, ARHGAP18, NSL1, WTAP, ZNHIT6, BCAS2, HAUS6, MORF4L1, SMC4, MBD4, PRPF18, CWC22, UBAP2L, SMURF2, KDM6B, PRKAA2, LIFR, RBM8A, SNURF, DAZAP2, FAM120C, WDR17, ZDHHC15, GTF2H2C, SRGAP1, ZSWIM5, RAF1, ZNF286B, ZNF528, ZNF572, ZNF527, XYLB, FNBP4, PRPF4, SIPA1L3, ZNF382, RFXAP, RBM39, CWC25, ZIM2, ANXA9, MFSD11, BPNT1, GPN3, MAPT, PPP1R16B, ZNF250, RAD52, ZNF786, GNB5, MNS1, TARBP1, RBM6, PRKN, ZCWPW2, MAMDC2, IPCEF1, NFATC4, LPAR1, VXN, FAM107A, IL16, USP22, RNF112, CRY2, PLAGI, IQUB, PPP1R8, BNIP3L or any combination thereof.

[0268] In some embodiments, the genes comprising speckle Signature II are selected from the group consisting of SON, RBM27, TCF12, BCLAF1, ERBIN, SETD2, TCP1 IL2, EPC2, TRIP12, YLPM1, LMTK2, GPATCH8, DDX46, PRPF4B, TAB3, EPG5, RSBN1L, SF3B1, PUS7L, KCTD20, RBM26, BAZ2A, RBM41, RREB1, ZNF621, FAM160B1, CDK13, SDE2, DHX15, PRPF40A, CHIC1, SREK1, LIN52, BARD1, ZNF441, GNAQ, THRAP3, HBP1, SMC5, PPP4R3B, RBBP6, TTC26, COG6, ZC3H14, UBE3B, MRTFB, YTHDF3, UBE4A, CBLL1, API5, CMTR2, TBC1D12, WRN, KIAA1328, TMEM209, ZCCHC4, MAPK14, ZNF160, SLU7, ERCC8, FOXJ3, PCLO, RSRC1, ZC3H11A, BMP2K, RALGAPB, FBXL4, RTL6, RCAN3, FBXO34, ZBTB8A, CWF19L2, SRRM2, HELQ, FYTTD1, PPIG, ANKRD44, SOCS6, S100PBP, ZNF304, ZNF543, RBM25, EFCAB13, CPD, ARMCX5, POLI, ZNF551, MAML3, POLR3B, SFMBT2, DDX17, RNF169, KAT6A, DDX42, GPATCH2, CBFA2T2, E2F3, ZNF169, TAF5L, KIAA0100, PRKAA1, LHX4, RSRC2, CSRNP2, NCBP3, NCAPG2, SF3A1, DENND1B, BRD2, PNISR, E2F7, LRRC8B, PACSIN2, PNN, KIAA0556, SAP130, CPSF6, MAP3K7, TADA2A, HP1BP3, ZNF217, BRD1, SRRM1, SRSF11, GLYR1, FAM227B, AAGAB, PLRG1, FCHSD2, MECOM, TMEM56, CDYL, ELOA, STK17A, RIOK1, ARHGAP42, R3HCC1L, COPS4, BORCS7, THOC1, CIR1, PYROXD1, ARHGAP18, NSL1, WTAP, ZNHIT6, BCAS2, HAUS6, MORF4L1, SMC4, MBD4, PRPF18, CWC22, UBAP2L, SMURF2, KDM6B, PRKAA2, LIFR, RBM8A, SNURF, DAZAP2, FAM120C, WDR17, ZDHHC15, GTF2H2C, SRGAP1, ZSWIM5, RAF1, ZNF286B, ZNF528, ZNF572, ZNF527, XYLB, FNBP4, PRPF4, SIPA1L3, ZNF382, RFXAP, RBM39, CWC25, ZIM2, ANXA9, MFSD11, BPNT1, GPN3, MAPT, PPP1R16B, ZNF250, RAD52, ZNF786, GNB5, MNS1, TARBP1, RBM6, PRKN, ZCWPW2, MAMDC2, IPCEF1, NFATC4, LPAR1, VXN, FAM107A, IL16, USP22, RNF112, CRY2, PLAGI, IQUB, PPP1R8, BNIP3L, VAX2, JDP2, PLEKHN1, HDAC5, C11ORF49, SLC4A2, STYXL1, TMEM179B, TAB1, ZNF446, TBXA2R, UNC45A, PCBP1, PHLDB3, KTI12, AKAP17A, PRCC, ZNF821, SPINDOC, HSF4, DEXI, HEXIM2, EHMT2, VPS72, DDX39A, KIF22, DPCD, LHPP, CD2BP2, CDK11B, GTF2H4, DGKZ, SARNP, ALYREF, SLC2A4RG, TEPSIN, AKAP8L, PPIE, STK19, FIBP, C60RF226, H2AFX, EGFL8, PSMD13, CACTIN, EXOSC7, C120RF57, THAP4, TMEM259, THOC6, AP5Z1, PQBP1, RBM10, C1ORF35, C19ORF24, SART1, CDC34, FASTK, POMP, PRPF6, PRPF19, BRK1, UFC1, SNRPA1, ZCCHC17, SNRPB2, PCP2, SSH3, SETD1A, WDR90, THEM6, U2AF2, RBM14, MAST3, LIMK1, SF3B4, DDX39B, RTEL1, ZNF165, MAPK12, PSMD8, CDK5RAP1, PDZK1IP1, SETD4, CHTOP, CDK11A, SRSF4, TBX19, RTN2, CCDC32, CYSRT1, IQCK, MPP1, MAMSTR, ILRUN, DBNDD1, EPHB6, TCF15, C60RF52, CYGB, CCDC85C, PHYHD1, ITPKC, CDC25C, RMI2, SNRNP40, HIST1H1E, ZC3H18.

[0269] In some embodiments, the invention also includes a method of treating a DNA-speckle related cancer in a subject in need thereof, comprising administering to the subject an effective amount of the pharmaceutical composition comprising the polypeptides of the invention disclosed herein, thereby treating the cancer.

[0270] In some embodiments, the invention includes a method of treating a DNA-speckle related cancer in a subject in need thereof, comprising administering to the subject an effective amount of a polypeptide comprising a first polypeptide domain, a second polypeptide domain, and a third polypeptide domain, wherein the first polypeptide domain comprises a cell penetrating peptide, the second polypeptide domain comprises a linker region, and the third polypeptide domain comprises a DNA-speckle targeting motif. In some embodiments, the DNA-speckle targeting motif comprises an amino acid sequence set forth in any one of SEQ ID NOs: 1-1730.

[0271] In some embodiments, the current disclosure also provides a method of treating a speckle signature-associated cancer in a subject in need thereof, comprising obtaining a specimen of tumor tissue, isolating and purifying RNA from the specimen, performing RNA-seq using the RNA to determine the speckle signature of the tumor tissue, and administering an effective amount of an anticancer therapeutic, thereby treating the cancer. In certain embodiments of the method, the sensitivity of the tumor to the anticancer therapeutic correlates with the speckle signature of the tumor tissue.

[0272] In certain embodiments, the speckle signature is associated with speckle signature I. In certain embodiments, the speckle signature is associated with speckle Signature II. In certain embodiments of the method, choosing a speckle signature correlated treatment strategy improves treatment prognosis. In some embodiments, the cancer is selected from the group consisting of clear cell renal cell carcinoma, neuroblastoma, KMT2D wild type melanoma, TTN wild type lung adenocarcinoma, BRAF wild type thyroid cancer, and PIK3R1 mutant endometrial cancer. In some embodiments, the anticancer therapeutic is selected from the group consisting of a biologic, a small molecule, a chemotherapeutic, an immunotherapy, and any combination thereof. It is envisioned that any anticancer treatment which can be demonstrated to have a beneficial effect which correlates with tumor speckle signature can be used with the methods of the current disclosure. In certain embodiments, the immunotherapy is an immune checkpoint inhibitor. A non-limiting example of an immune checkpoint inhibitor that demonstrates a treatment correlation with DNA speckle signature is inhibition of the PD-1 signaling pathway (e.g., by nivolumab, an anti-PD1 antibody). The PD-1 signaling pathway can be inhibited by a number of strategies, including antibody blockade of PD-1, PD-L1, PD-L2, and/or the use of receptor antagonists or non-functional ligands. Other examples of immune checkpoint inhibitors that can be used with the methods of the current disclosure include, but are not limited to inhibitors of CTLA-4, Lag-3, TIGIT, Tim-3, BTLA, VISTA, among others, including combinations thereof. In some embodiments, the therapeutic inhibitor is an inhibitor of HIF-2a. A number of HIF-2a inhibitors are known in the art, including but not limited to PT2399, PT2385, and PT2977 also known as belzutifan and MK-6482.

[0273] In some embodiments, the current disclosure provides methods for determining the speckle phenotype by measuring the localization profile of nuclear speckles within the cell nucleus in formalin-fixed, paraffin-embedded (FFPE) tumor specimens. In some embodiments, this involves at least one speckle-resident protein or other protein whose nuclear localization correlates with speckle location. Non-limiting examples of speckle-resident and/or speckle-associated proteins include, but are not limited to SON, SRRM2, and RBM25, among others. In some embodiments, the gene expression-calculated speckle signature profile corresponds to the physical location of the speckle structure within the nucleus (e.g. in the center of the nucleus or dispersed within the nucleus. For example, gene expression-calculated speckle signature II is correlated with centrally-located speckles, while gene expression-calculated speckle signature I is correlated with more dispersed speckle structures which are spread throughout the nucleus. In some embodiments, the determination of a speckle phenotype is informed by determining the expression level of one or more speckle-associated proteins. In some embodiments, the determination of a speckle phenotype is informed by determining the positioning or localization of a speckle-resident protein or a nuclear speckle structure within the nucleus. In some embodiments, the determination of a speckle phenotype is informed by both the expression level of one or more speckle-resident proteins and the positioning or localization of a speckle-associated protein or a nuclear speckle structure within the nucleus.

[0274] In some embodiments, the speckle relevant cancer displays a speckle signature. In some embodiments, the speckle signature is speckle Signature I as defined herein. In some embodiments, the expression pattern characteristic of a speckle signature correlates with worse prognosis and survival. Depending on the cancer, the speckle signature associated with worse clinical outcome can be Signature I or Signature II. In certain preferred embodiments, the cancer is clear cell renal cell carcinoma (ccRCC), wherein expression of speckle Signature I is associated with poor prognosis and survival. Because the prevalence of the speckle Signature I or speckle Signature II has been found in many types of cancer, it is contemplated that the methods of the current invention can be used in the treatment of any cancer which possesses a speckle Signature I or II gene expression pattern. Additionally, because Signature I or II gene expression patterns correspond to differential functional pathways in many different cancer types, it is contemplated that the methods of the current invention can be used to predict responses to cancer treatments in any cancer which possesses a speckle Signature I or II gene expression pattern, regardless of whether the speckle Signature gene expression pattern correlates with overall prognosis in the cancer type. Examples of cancers which have been found to express speckle signatures include but are not limited to breast cancer, cervical squamous cell carcinoma, endocervical adenocarcinoma, colon adenocarcinoma, rectum adenocarcinoma, glioblastoma, head and neck squamous cell carcinoma, kidney renal papillary cell carcinoma, glioma, liver hepatocellular carcinoma, lung squamous cell carcinoma, lung adenocarcinoma, neuroblastoma, ovarian cancer, prostate adenocarcinoma, sarcoma, skin cutaneous melanoma, stomach adenocarcinoma, tenosynovial giant cell tumor, and thymoma.

### Manipulating Nuclear Speckles by Shifting the Speckle Signature

[0275] In some embodiments, the present invention provides methods to shift gene expression programs by manipulating nuclear speckles. The applications of these methods include, but are not limited to the treatment of clear cell renal cell carcinoma, neuroblastoma, melanoma, lung adenocarcinoma, thyroid cancer, endometrial cancer, p53 gain-of-function mutant cancers, and p53 wild type cancers that are treated with p53-activating agents.

[0276] In some embodiments, the present invention provides methods to manipulate speckles from signature I-like toward signature II-like. That is, manipulations that result in decreased amounts of speckle proteins or speckle protein genes that are high in speckle Signature I and/or that result in increased amounts of speckle proteins or speckle protein genes that are high in speckle Signature II or vice versa. Methods of manipulating speckle signature can be applied to cancers and diseases where speckle signature is associated with poorer subject prognosis and/or unfavorable outcomes. The goal of such methods is to shift the DNA-speckle gene expression signature from Signature I to Signature II or vice versa, depending on which signature is associated with worse clinical outcomes. Examples of such cancers the treatment of which would benefit from speckle signature manipulation include but not limited to clear cell renal cell carcinoma, neuroblastoma, KMT2D wild type melanoma, and PIK3R1 mutant endometrial cancer, among others.

[0277] In some embodiments, the present invention provides methods to manipulate speckles from Signature II-like toward Signature I-like. That is, manipulations that result in decreased amounts of speckle proteins or speckle protein genes that are highly expressed in speckle Signature II and/or that result in increased amounts of speckle proteins or speckle protein genes that are highly expressed in speckle Signature I. Such manipulations can be applied to treat cancers and diseases where speckle Signature II is associated with poorer subject prognosis and/or unfavorable outcomes, including but not limited to TTN wild type lung adenocarcinoma and BRAF wild type thyroid cancer among others.

[0278] Methods that manipulate the nuclear speckle signature are expected to globally skew gene expression patterns. In instances where the manipulations shift from a speckle Signature I-like gene expression pattern to a speckle Signature II-like gene expression pattern, expression of speckle-associated genes are expected to be generally reduced and expression of non-speckle-associated genes are expected to be generally elevated. In instances where the manipulations shift from a speckle signature II-like signature to a speckle signature I-like signature, expression of non-speckle-associated genes are expected to be generally reduced and expression of speckle associated genes are expected to be generally elevated.

[0279] In some embodiments, inhibiting or promoting individual speckle protein genes within the speckle signature will be sufficient to shift the speckle signature. This has been demonstrated for SART1 using siRNAs to deplete SART1 levels, which indicated an interdependence of speckle protein gene expression supporting a shift in speckle signature beyond the individual target of the manipulation. Hence, any of the speckle protein genes within the speckle signature are considered to be potential therapeutic targets that may be used to shift towards a favorable speckle signature.

[0280] In some embodiments, the effectiveness of each manipulation in shifting the speckle signature is benchmarked using RNA sequencing comparing the manipulation to an appropriate control condition (i.e. non-targeting control siRNA for siRNA manipulations), assessing the degree to which the manipulation shifts gene expression patterns depending on their speckle association status, and comparing the RNA expression fold change in manipulated condition versus control to patient signature group-defined expression patterns.

[0281] In addition, shifts in the speckle signature are assessed by immunofluorescence studies of the key speckle proteins using the assays described in the present disclosure. The efficaciousness of shifting speckle signature for treating clear cell renal cell carcinoma is assessed in cell-based cancer assays, including anchorage-independent growth, invasion assays, and assessing expression properties of the cells. In addition, mouse xenograft assays can be used to determine the tumor suppressive or tumor promoting consequences of shifting the speckle signature in ccRCC pre-clinical models.

[0282] In some embodiments, the current invention includes methods for shifting the speckle signature of a particular tissue comprising the use of nucleic acid inhibitors and activators including but not limited to siRNAs, shRNAs, CRISPR/Cas9 technology, dominant negative expression plasmids, and overexpression plasmids and the like. Such inhibitory nucleic acids are well known in the art and are directed against the mRNA of one or more target genes, thereby decreasing the expression of the target genes. In some embodiments, the methods for shifting the speckle signature comprise the use of antibody inhibitors and PROTACs (proteolysis targeting chimeras) or other small molecule inhibitors that alter the amount or localization of speckle protein genes.

Measurement of Nuclear Speckle Positioning within the Nucleus

[0283] In some aspects, the current invention measures nuclear speckle positioning within the nucleus using immunofluorescence detection of the speckle-resident protein, SON, in formalin-fixed paraffin-embedded (FFPE) tissue sections. In some embodiments, the protein SON is detected using immunofluorescence microscopy using the SON antibody, ab121759 (abcam; RRID: AB_11132447). However, any antibody or specific marker that suitably labels nuclear speckles may be substituted. To assess positioning of nuclear speckles within the nucleus, the present invention makes use of a nuclear stain. In some embodiments, this nuclear stain labels DNA, such as DAPI or Hoechst 33342. In some embodiments, the nuclear speckle and nuclear stain of the current invention are detected by fluorescence microscopy. In one embodiment, images are obtained at 20× magnification on a widefield microscope (for example, Nikon Ti2E; objective: CFI60 Plan Apochromat Lambda 20× Objective Lens, N.A. 0.75, W.D. 1.0 mm, F.O.V. 25 mm, DIC, Spring Loaded), or an instrument and objective with comparable resolution. In some embodiments images are obtained at several (ie 7-9) optical sections and combined into a single maximum projection image using analysis tools typical to one familiar in the art, including, but not limited to, the MakeProjection module of the CellProfiler software. In another embodiment, images are obtained at a single in-focus optical section and used directly for subsequent calculation of nuclear speckle positioning. Nuclear speckle positioning is calculated by the fraction of nuclear speckle marker (ie SON) signal within radially-distributed bins within the cell nucleus. In one embodiment, the nucleus is fractioned radially into four bins—for example, with the first bin being the nucleus center and the fourth bin being the nucleus periphery—and the fraction of speckle signal is calculated for each bin using tools available to those familiar with the art, including, but not limited to the MeasureObjectlntensityDistribution module of CellProfiler. For each sample, per-nucleus measurements are extracted, and the median of these measurements is assigned to the subject.

[0284] As comparators, a cohort of tissue-matched tumor adjacent samples may be used. In one embodiment, high-risk ccRCC subjects are classified as those with lower speckle signal at the central nuclear fraction than the bottom 10% of the tissue-matched tumor adjacent samples. In another embodiment, high-risk ccRCC subjects are classified as those in the bottom 40% of fraction SON signal in the nucleus center of an early stage (Grade 1 and Grade 2) ccRCC cohort. It is noted that these percentages are to serve as general guidelines, and that the exact risk stratification may be contingent on the precise circumstance.

[0285] In some embodiments, other predictors of patient outcomes are paired with speckle signal radial distribution within the nucleus. These include, but are not limited to subject age, and radial distribution measurements of the DNA signal, which is also collected using the methods described in the present invention. In one embodiment, the coefficient of variation of DNA signal within the central radial fraction (ie RadialCV1of4 extracted from CellProfiler module MeasureObjectIntensityDistribution applied to DNA stained images) is used in combination with speckle radial distribution to identify high-risk subjects.

[0286] The practice of the present invention employs, unless otherwise indicated, conventional techniques of molecular biology (including recombinant techniques), microbiology, cell biology, biochemistry and immunology, which are well within the purview of the skilled artisan. Such techniques are explained fully in the literature, such as, “Molecular Cloning: A Laboratory Manual”, fourth edition (Sambrook, 2012); “Oligonucleotide Synthesis” (Gait, 1984); “Culture of Animal Cells” (Freshney, 2010); “Methods in Enzymology” “Handbook of Experimental Immunology” (Weir, 1997); “Gene Transfer Vectors for Mammalian Cells” (Miller and Calos, 1987); “Short Protocols in Molecular Biology” (Ausubel, 2002); “Polymerase Chain Reaction: Principles, Applications and Troubleshooting”, (Babar, 2011); “Current Protocols in Immunology” (Coligan, 2002). These techniques are applicable to the production of the polynucleotides and polypeptides of the invention, and, as such, may be considered in making and practicing the invention. Particularly useful techniques for particular embodiments will be discussed herein.

[0287] The following examples are put forth so as to provide those of ordinary skill in the art with a complete disclosure and description of how to make and use the assay, screening, and therapeutic methods of the invention, and are not intended to limit the scope of what the inventors regard as their invention.

### EXPERIMENTAL EXAMPLES

[0288] The invention is further described in detail by reference to the following experimental examples. These examples are provided for purposes of illustration only, and are not intended to be limiting unless otherwise specified. Thus, the invention should in no way be construed as being limited to the following examples, but rather, should be construed to encompass any and all variations which become evident as a result of the teaching provided herein.

[0289] Without further description, it is believed that one of ordinary skill in the art can, using the preceding description and the following illustrative examples, make and utilize the compounds of the present invention and practice the claimed methods. The following working examples therefore, specifically point out the exemplary embodiments of the present invention, and are not to be construed as limiting in any way the remainder of the disclosure.

### Methods for Screening and Developing Peptide and Small Molecule Inhibitor Compositions

[0290] Inhibitors of speckle targeting are screened in imaging-based assays. For p53, this employed the MCF7-H2 cell line that harbors endogenously-labelled transcription sites of the p21 p53 target. MCF7-H2 cells were subjected to p53 activation with p53-activating compounds such as Nutlin-3a. Cells are then stained for immunofluorescence using the speckle marker protein, SRRM2. The cells are then imaged in well-plates, with each well containing a different speckle targeting inhibitor candidate peptide or small molecule. Known disruptors of p53-mediated speckle association, such as knockdown of the SON speckle protein gene are included on each plate as a positive control for speckle-targeting-blocking compounds. Using semi-automated image analysis software, speckle association of p21 is measured and other properties of the cells were assessed, including nuclear size, as well as speckle area and shape. For HIF2A, similar assays are performed in 786O ccRCC cell lines that have hyperactive HIF2A, and using immunoRNA-FISH for the DDIT4 HIF2A target gene. To determine transcription factor STM-targeting specificity, the concentration dependent inhibitory activities of each designed peptide are determined for each system, with the expectation that STM-containing peptides that more closely resemble the p53 STM will have higher specificity to p53-mediated speckle targeting and that peptides that more closely resemble the HIF2A STM had have higher specificity to HIF2A-mediated speckle targeting.

[0291] To assess the efficaciousness of inhibitors of speckle targeting for restricting cancer cell growth in an on-target manner, the effects of each inhibitor on proliferation are determined in cell lines that are and are not expected to be influenced by the inhibitor. For p53, this includes cancer cell lines that have gain-of-function p53 versus those that have null p53 (as in Zhu et al., 2015). For HIF2A, this includes ccRCC cell lines with hyperactive HIF2A (786O, A498, UMRC2, RCC4, and RCC10) versus primary renal tubule epithelial cell lines (i.e. HK2 or RPTEC-hTERT) and cancer cell lines without hyperactive HIF2A (i.e. cell lines used in for p53 testing). The designed compositions should lead to selective killing of p53 gain-of-function cancer cell lines (for p53-targeting STM compounds) and cancer cell lines with hyperactive HIF2A (for HIF2A-targeting STM compounds). Inhibitors of transcription factor speckle targeting are expected to have consequences on gene expression programs, reducing expression of speckle-associating transcription factor target genes and leading to either no change or an increase in non-speckle-associating transcription factor target genes. This is tested by RNA-seq and/or qRT-PCR for each successful speckle-targeting-blocking composition.

### Example 1. P53 Mediates Target Gene Association with Nuclear Speckles for Amplified RNA Expression

[0292] Recent studies have demonstrated that DNA-speckle association can be mediated by the p53 transcription factor (Alexander et al., 2021). Relevant to the present invention, it was found that not all p53 targets experience DNA-speckle association and the corresponding expression boost, and these associating and non-associating p53 targets fall into distinct functional categories. These studies also mapped the domain required for p53-mediated speckle association to the p53 proline rich domain, showing that deletion of p53 amino acids 62-77 disrupted its speckle targeting function. Likewise, mutagenesis studies of individual amino acids within p53 together with identification of a second speckle-targeting transcription factor, HIF2A (see Example 2), enabled the identification of the speckle targeting motif, derivatives of which are the basis for compositions of the present invention.

Specific Locations of Negatively Charged Amino Acids are Critical for p53-Mediated DNA Speckle Association.

[0293] To identify the specific amino acids required for DNA-speckle association by p53, p53 point mutants were screened for speckle targeting abilities of the p21 p53 target gene using immunoDNA-FISH in the Saos2 p53-null osteosarcoma cell line induced to express exogenous wild type or mutant p53 with a doxycycline-inducible system. In these experiments, immunofluorescence with the speckle protein SON were used in combination with DNA-FISH probes to the p21 DNA locus as previously described (Alexander et al., 2021). With the expectation that previously described mutants possessing deletion of amino acids 62-77 may have disrupted those amino acids together with the chemistry of surrounding regions, the current study focused on p53 mutants spanning and surrounding this region, from P47 to T81 (P47A, D48A, D49A, Q52A, E56A, D57A, G59A, R65A, M66A, E68A, P72R, and T81A). Of these point mutations, two were identified to significantly alter the ability of p53 to drive speckle association of the p21 locus: the p53 D57A mutation, which increased p53-mediated speckle association, and the p53 T81A mutation, which decreased speckle association (FIG. 1). Of note, D57 in p53 is two amino acids away from T55, a phosphorylatable p53 residue (see FIG. 2 for p53 proline rich domain sequence). Meanwhile, T81 is also subject to regulated phosphorylation within the p53 protein. Based on the results of this mutagenesis screen, and without wishing to be bound by theory, it was hypothesized that the speckle targeting functions of p53 may be subject to regulation by phosphorylation and that p53-mediated speckle association could be manipulated by altering the negative charge at particular amino acid positions. To test this, Threonine to Alanine mutations were utilized that cannot carry a negative charge and Threonine to Aspartate mutations that are constitutively negatively charged. It was found that the p53 T55A mutant were competent at p21 speckle targeting, while the T55D mutant was defective (FIG. 3), indicating that a negative charge at the T55 residue is inhibitory towards speckle association. This finding is consistent with previous findings that elimination of negative charge in the area of D57A, improves DNA-speckle targeting by p53. Previous NMR studies of p53 phosphorylation at T55 indicate that phosphorylation of this amino acid resulted in increased contact between the second p53 transactivation domain and the p53 DNA binding domain (Sun et al., 2021). Hence, phosphorylation of T55 may obscure the proline rich domain that lies between the transactivation domain and the DNA binding domain, potentially masking it from speckle-targeting machinery.

[0294] Based on this observation, the importance of a linker region in the peptide inhibitor composition of the present invention is noted, which enables accessibility of the speckle targeting motif. Further studies and analysis, detailed below, indicate that T55 does not fall within the conserved speckle targeting motif, which instead begins at p53 amino acid 60. Thus, the effect of negative charge of T55 is more likely due to interference of other p53 protein domains with speckle targeting p53 functions.

[0295] The T81 mutation behaved in an opposite pattern to the T55 p53 mutations in that introduction of a negative charge in the T81D mutant resulted in competent p53-driven speckle association, while the uncharged T81A mutant was defective at speckle targeting (FIG. 3). Hence, the negative charge at this position supports p53 mediated DNA speckle association and is thus a critical feature for the peptide inhibitors of the present disclosure.

### Example 2. HIF2A Mediates Target Gene Association with Nuclear Speckles

[0296] Beyond p53 (Alexander et al., 2021), the extent to which other transcription factors mediate the association between specific DNA targets and nuclear speckles is not known.

Hypoxia Induction with CoCl2 Induces Speckle Association of HIF2A Target Gene CCND1.

[0297] Without wishing to be bound by theory, it was hypothesized that transcription-factor-based targeting of specific DNA sequences to speckles is a widely used mechanism of gene regulation that is employed by most eukaryotic cells. To explore this idea, speckle targeting was investigated in the context of hypoxia, a cell stress that results in the activation of hypoxia-inducible transcription factors (HIF transcription factors: HIF1A, HIF2A, and HIF3A). Using immunoRNA-FISH to measure speckle association, HeLa cells were treated with CoCl2, a mimic of hypoxia, and assessed for changes in speckle association of the HIF2A target gene CCND1. It was found that CoCl2 treatment resulted in increased speckle association of the CCND1 gene locus (FIG. 4), indicating regulated speckle association of this gene upon hypoxic stimulus, but not yet pinpointing the involvement of a specific transcription factor.

Treatment of ccRCC Cell Lines with HIF2A Inhibitor Abolishes Speckle Association.

[0298] The hypoxia transcription factors are frequently hyper-active in cancer, particularly in clear cell renal cell carcinoma, which is typified by inactivating mutations in the VHL negative regulator of HIF1A and HIF2A. HIF2A inhibition as a therapeutic strategy for clear cell renal cell carcinoma has been particularly promising in pre-clinical models and in clinical trials, and a specific inhibitor targeting the interaction between HIF2A and its obligate DNA-binding heterodimer, HIF1B, has recently been FDA approved for use in individuals with germline mutations in the VHL protein. To specifically probe the role of HIF2A in maintaining speckle contacts when constitutively active in clear cell renal cell carcinoma conditions, genome-wide speckle contacts were measured using SON TSA-seq in 786O cells, a clear cell renal cell carcinoma cell line with constitutive HIF2A in the absence of HIF1A, treated with a DMSO vehicle control or with PT2399, a specific HIF2A inhibitor. To validate the on-target activity of PT2399, RNA-seq and ChIP-seq of HIF2A in 786O cells were first performed in a time-course study of PT2399 treatment (FIG. 5), which confirmed that PT2399 was behaving as expected, that is, inhibiting HIF2A genomic binding as well as HIF2A-dependent gene expression. Assessing speckle association upon PT2399 treatment identified 175 HIF2A-dependent genes (defined as genes that decrease upon PT2399 treatment) that decreased their SON TSA-seq speckle signal upon HIF2A inhibition (FIG. 6). Like p53-mediated speckle association, the speckle-associating HIF2A targets were of distinct functional categories as compared to the non-associating HIF2A targets. These studies establish HIF2A as a second transcription factor capable of driving DNA-speckle association of gene targets and provide additional evidence that speckle-associating abilities of transcription factors may benefit particular classes of target genes. This aspect is of particular importance to the present disclosure, in those changes in speckle association or in speckle content are capable of shifting the type of gene expression programs within cells.

HIF2A has a Homologous Domain to p53, Identifying it as a Conserved Speckle Targeting Motif.

[0299] The identification of a second speckle-targeting transcription factor allowed the comparison of the two factors in search for a homologous motif that confers speckle-targeting abilities. To do so, a pairwise alignment tool that searches for local peptide sequence similarities was utilized (EMBOSS Matcher). This tool found that the most similar amino acid sequence between p53 and HIF2A was p53 amino acids 62-90 with HIF2A amino acids 450-478 (FIG. 7). This finding matched exactly with previous experiments showing that p53 amino acids 62-77 were essential for p53-mediated speckle association and provided additional insight into the finding that the charge status of p53 amino acid T81 modulates p53-speckle targeting of p21. Based on our combined observations of the centrality of the p53 T81 amino acid to this conserved motif, termed the speckle targeting motif, together with our finding that the T81A mutation abolishes p53-mediated speckle association, we posit that this particular Threonine is a key feature of the speckle targeting motif. The other key similarity between the HIF2A and p53 speckle targeting motifs is the periodicity of Proline amino acids, which occur every five amino acids in the HIF2A and p53 speckle targeting motifs leading up to the central TP/SP dipeptide and continue at this periodicity for the p53 speckle targeting motif.

A Search of the Proteome Reveals that the Speckle Targeting Motif is a Recurring Structure Found in Regulators of Gene Expression.

[0300] A search of the proteome revealed that the speckle targeting motif is a recurring structure found in regulators of gene expression. Based on the discovery of a conserved speckle targeting motif between HIF2A and p53, a set of properties was devised for speckle targeting motifs in general. Based on this definition, studies then used the MOTIF2 online tool to extract all human peptides with the x(30)-[TSED]-P-x(30) or x(30)-[TS]-P-x(30) motifs in separate analyses. A Python program was then written to format the files and apply the aforementioned properties. This approach identified 1075 proteins (for x(30)-[TS]-P-x(30); Table 1) and 1460 proteins (for x(30)-[TSED]-P-x(30); Table 2) that harbored putative speckle targeting motifs. Inputting these proteins into STRING-DB, a database of protein-protein interactions, it was found that speckle target motif-containing proteins were more likely to be interconnected with one another compared with random chance in a physical protein interaction network (p<1⁻¹⁶; FIGS. 8 and 9 show connected components of the network). The speckle target motif-containing proteins were extremely enriched in Biological Process, Molecular Function, and Cellular Component categories relating to RNA production and nuclear chromatin (see FIG. 33 for Biological Process; FIG. 34 for Molecular Function; FIG. 35 for Cellular Component). These discoveries revealed that the speckle targeting motif recurs among proteins involved in gene expression and that are found within the cell nucleus, specifically among factors that bind DNA. For the disclosure of the present invention, these observations provide support for the broad utility of compositions and methods that target DNA-speckle association by gene regulators and that target nuclear speckles. In parallel, the identification of biologically occurring speckle targeting motifs helps guide decisions for manipulation of the biochemical properties of the compositions of the present invention.

[0301] Proteins that contain speckle targeting motifs include many factors that are of high interest for therapeutic targeting. Of particular interest for commercial development are:
[0302] 1. KLF4, OCT4, and TOX4 in the context of induced pluripotent stem cell generation
[0303] 2. Factors implicated in T cell function and T cell exhaustion, including FLIT, TOX2, and HIVEP3.
[0304] 3. Factors involved in neurogenesis (including NEUROD1), mental health (which was enriched within the disease category of factors with speckle targeting motifs; FIG. 9), and neurodegeneration (including HTT, the protein responsible for Huntington disease).
[0305] 4. HOXB13, which contains genetic risk factor for prostate cancer within speckle targeting motif (FIG. 10).

### Example 3. Nuclear Speckles Broadly Regulate Gene Expression in Clear Cell Renal Cell Carcinoma and are Predictive of Patient Outcomes

[0306] Here the present disclosure demonstrates that nuclear speckle expression patterns are predictive of patient survival in ccRCC and can be manipulated to globally shift gene expression patterns depending on gene speckle association status.

ccRCC Cell Lines Differ in Speckle Association Phenotypes and Functions.

[0307] As an independent method to validate the speckle targeting activities of HIF2A in clear cell renal cell carcinoma observed in Example 2, immunoRNA-FISH experiments were used to measure changes in speckle association upon HIF2A inhibition with the PT2399 drug. These experiments used 786O cells, which were used for the genomics experiments in Example 2, and A498 cells, another ccRCC cell line that, like 786O cells, have hyperactive HIF2A in the absence of HIF1A. Consistent with our SON TSA-seq experiments, 786O cells showed HIF2A-dependent speckle association of HIF2A-responsive genes CCND1 and DDIT4 (FIG. 11). Under control, HIF2A hyperactive conditions, these cells displayed an L-shaped relationship between nascent RNA amount within transcription sites and distance to speckle, indicating that speckle-adjacent transcription sites accumulate nascent RNAs. These findings were similar to previously published observations of RNA-FISH with p53-mediated speckle association. In contrast, A498 cells did not show HIF2A-dependent changes in gene-speckle association or the L-shaped relationship between nascent RNA amounts and distance to speckle (FIG. 12). Thus, these two different ccRCC cell lines differ in their speckle association phenotypes. PT2399 treatment of each cell type resulted in a comparable number of decreased genes in each cell type (FIG. 13), indicating that this cell type difference was not due to different degrees of responsiveness to the HIF2A inhibitor. Although there were many HIF2A-responsive genes that were uniquely regulated in one or the other cell line. Hence, 786O cells and A498 cells differ both in speckle-association phenotypes as well as which genes are responsive to HIF2A inhibition.

Nuclear Speckle Content Varies Among ccRCC Patients.

[0308] Given the present findings of cell type variations in speckle association phenotypes between the two patient-derived ccRCC cell lines, the existence of patient-to-patient variation in nuclear speckles was then investigated. To examine this, the Human Protein Atlas was used to extract speckle-resident proteins and their RNA expression was determined using The Cancer Genome Atlas (TCGA) RNA-seq data downloaded from the GDC in September 2021. To focus on HIF2A-driven clear cell renal cell carcinoma, this analysis specifically used patient tumor samples and tissue-adjacent controls from the subset of VHL-mutated patients among the kirc TCGA cohort. To narrow upon the most differential speckle protein genes, the genes that contributed most to patient variation were extracted in principle component analysis principal component 1 (PC1). Hierarchical clustering of expression of these speckle protein genes showed that tissues separated into three distinct speckle protein gene expression clusters: two tumor clusters (called Signature I and II) and a normal tissue cluster (FIG. 14). Both tumor clusters show aberrant expression of speckle protein genes as compared to the normal tissue cluster. However, the speckle Signature I patient cluster is more dissimilar to normal tissue and displays reciprocal expression of speckle protein genes compared to the speckle Signature II patient cluster. These results demonstrate that ccRCC patients can be split into two groups based on their speckle protein gene expression patterns.

Speckle Signature I is Associated with Poor Patient Outcomes and Molecular Features.

[0309] To illuminate whether speckle signature may impact patient outcomes, studies next compared clinical characteristics of patients with speckle Signature I versus speckle Signature II (FIG. 15). It was found that patients with speckle Signature I were more likely to have advanced stages of ccRCC, were more likely to have metastatic disease, and had significantly poorer overall survival compared to patients with speckle signature II. To understand the etiology of the poor outcomes in the speckle Signature I patient group, we assessed expression patterns of the top mutated genes in ccRCC within the patient cohort. While mutation frequencies did not differ between patient groups, the expression of the top mutated genes in ccRCC did differ (FIG. 16). For example, the only gene mutated in the VHL-mutant ccRCC cohort in more than 10% of patients was PBRM1. PBRM1 was mutated in a similar percentage of tumors with speckle Signature I and Signature II, but notably was expressed at lower levels in tumors with speckle signature I. Thus, the speckle signature may be an alternative strategy used by tumors to drive decreased or increased function of particular cancer-critical genes. These findings highlight the finding that separating patients by speckle signature provides a new means by which to sub classify ccRCC patients that differ their prognosis and in key molecular features of ccRCC.

### Biased Expression of HIF2A-Responsive Genes Between the Speckle Signature Patient Groups.

[0310] Studies next investigated whether the speckle signature alters expression of HIF2A-responsive genes. Separating the patients by speckle signature, it was found that certain HIF2A-responsive genes were preferentially expressed in samples with speckle signature I, while others were preferentially expressed in samples with speckle Signature II (FIG. 17). The HIF2A-responsive genes preferentially induced within Signature I versus Signature II patients belonged to distinct functional categories, indicating that the HIF2A functional program differs between these two patient groups. These data provide further evidence that the speckle protein gene expression signature defines distinct subclasses of ccRCC.

Expression Biases Between the Speckle Signature Patient Groups is Highly Correlated with Gene Speckle Association Status.

[0311] The findings of the present disclosure link a nuclear speckle phenotype to patient outcomes and indicate that nuclear speckles and DNA-speckle association are consequential and widespread gene regulatory mechanisms that shift transcription factor functional programs. As such, it can be hypothesized that speckle signature in ccRCC shifts expression of genes depending on their speckle association status. The speckle association status of HIF2A-responsive genes was first examined based on whether they were preferentially expressed in the Signature I or Signature II ccRCC patient groups. This analysis revealed that Signature I-biased HIF2A-responsive genes have high amounts of speckle association, while Signature II-biased HIF2A-responsive genes have low amounts of speckle association (FIG. 18). In a quantitative analysis taking the ratio of gene expression in the Signature I to II patient group versus the SON TSA-seq speckle association signal, there was a highly significant correlation (Linear Regression p<1⁻¹⁶) indicating that speckle associating genes are much more likely to be highly expressed in the Signature I patient group, while non-speckle associating genes are much more likely to be highly expressed in the Signature II patient group. These data demonstrate a strong link between speckle phenotype and expression of speckle-associating genes and also suggest reciprocal regulation of speckle and non-speckle-associating genes predicted by the speckle signature.

### 786O Cells More Closely Resemble the Speckle Signature I Patient Group.

[0312] The determination of speckle signatures in ccRCC patients disclosed herein provides additional context to understand previous findings of differences between the 786O cell line, where HIF2A was required for speckle association and HIF2A targets displayed a speckle-association boost in nascent RNA (FIG. 11), and the A498 cell line where HIF2A did not regulate speckle association and did not display speckle-associated boosts in nascent RNA (FIG. 12). To investigate whether 786O and A498 cells reflected the different speckle signature patient groups, it was then assessed whether the 786O-specific and A498-specific HIF2A target genes previously identified in RNA-seq studies (FIG. 13) showed biased expression in the patient speckle signature groups. This analysis revealed that 786O-specific HIF2A-responsive genes were biased toward being highly expressed in the speckle Signature I patient group, the group of genes that was commonly regulated in both 786O and A498 cells showed little bias between patient groups, and the group of A498-specific HIF2A-responsive genes was biased toward being highly expressed in the speckle Signature II patient group (FIG. 19; p-value for each comparison <1⁻¹⁶). Hence, 786O cells more closely resemble the speckle Signature I patient group, which is biased towards higher expression of speckle associating genes. This finding is consistent with previous findings of the relationship between speckle association and boosted amounts of nascent RNA in 786O cells, but not A498 cells (compare FIGS. 11 and 12).

### Depletion of Speckle Signature I Speckle Protein Gene, SART1, Compromises Expression of Speckle Associated Genes and Boosts Expression of Non-Speckle Associating Genes in 786O Cells.

[0313] The present findings suggest that speckle Signature I supports expression of speckle associating genes and worsens patient outcomes in ccRCC, while speckle Signature II supports expression of non-speckle-associating genes and improves patient outcomes. To functionally test this, studies next sought to shift the Signature I-like 786O cells toward a Signature II-like phenotype by manipulating the expression levels of speckle protein genes. When compared to A498 cells, 786O cells have significantly higher expression levels of 27 of the speckle protein genes that are high in speckle signature I. As a proof-of-principle experiment, one of these Signature I speckle protein genes, SART1, was selected and knocked-down in 786O cells. Splitting the genome up into deciles based on gene speckle association levels, and graphing the fold change of gene expression upon SART1 siRNA knockdown, it was found that SART1 knockdown resulted in a global decrease in expression of speckle-associated genes (FIG. 20; Group 10) together with a global increase in expression of non-speckle associated genes (FIG. 20; Group 1), supporting the conclusion that speckle Signature I promotes expression of speckle-associating genes. In a second analysis, genes decreasing upon SART1 knockdown were found to have higher speckle association than unchanged genes, and that genes increasing upon SART1 knockdown have lower speckle association than unchanged genes (FIG. 21). Together, these data provide strong evidence that SART1 depletion shifts gene expression away from speckle associated genes in favor of non-speckle-associated genes. It also supports the concept of reciprocal expression of speckle associating and non-speckle-associating genes.

### Depletion of Speckle Signature I Speckle Protein Gene, SART1, Transforms 786O Cells Toward a Speckle Signature II-Like Expression Phenotype.

[0314] Studies next investigated whether SART1 siRNA knockdown altered the expression patterns of Signature I and Signature II biased genes. To accomplish this, the genome was split up into deciles based on gene expression bias to Signature I versus Signature II, and the fold change upon SART1 knockdown was examined within each bin. The Signature I-biased genes were found to be significantly decreased upon SART1 knockdown (FIG. 22, Groups 6-10), while the Signature II-biased genes were significantly increased upon SART1 knockdown (FIG. 22; Groups 1-4). Using a separate analysis to demonstrate the same principle, genes whose expression decreases upon SART1 knockdown are biased to the speckle Signature I patient group, while genes not changing upon SART1 knockdown are not biased toward either patient group, and genes increasing upon SART1 knockdown are biased toward the speckle Signature II patient group (FIG. 23). Together, these results demonstrate that knockdown of an individual speckle protein gene is capable of driving global shifts in gene expression that transform 786O cells from a Signature I expression phenotype toward a Signature II expression phenotype.

[0315] Because the speckle signature involves expression patterns of ˜100 speckle protein genes, it was somewhat unexpected that the knockdown of a single speckle protein gene was sufficient to shift cells from a Signature I to a Signature II expression phenotype. To explore how a single gene knockdown is capable of driving this transformation, the consequences of SART1 knockdown on the expression of other speckle protein genes was investigated. This analysis revealed that SART1 knockdown results in a modest, but significant, decrease in expression of the other speckle Signature I speckle protein genes together with a robust increase in the expression of Signature II speckle protein genes (FIG. 24). These results suggest that the presence of an interconnected speckle regulatory circuit that is capable of toggling between speckle signatures. The presence of such regulatory feedback on the speckle signature helps explain observations that tumor samples segregate into two reciprocally-expressed speckle groups, with few to no patient cases showing globally high expression or globally low expression of all identified speckle protein genes.

### Other Regulators of Speckle Signature.

[0316] The findings presented herein provide the basis for one of the key methods for the present invention: using speckle manipulations to shift the speckle signature. An RNA-seq comparison between 786O and A498 cells, the bioinformatic definition of the speckle signature presented herein, and the generation of a resource listing all the speckle protein genes, their individual ability to predict ccRCC survival, and accompanying manual annotations of the specificity of their speckle localization based on data from the Human Protein Atlas are presented in FIGS. 35A-36G-1. Based on this analysis, knockdown of Signature II speckle protein genes HBP1 or COPS4 were found to be capable of shifting A498 cells from a Signature II-like expression phenotype to a Signature I-like expression phenotype (FIGS. 25 and 26).

### Example 4. The Speckle Signature is a Reproducible Phenomenon Among Human Cancers and is Predictive of Survival Depending on Mutation Status

[0317] Studies disclosed herein in Experimental Example 3 establish that nuclear speckles are critical regulators of gene expression patterns that predict patient survival in ccRCC. Based on these findings, and without wishing to be bound by theory, it was hypothesized that the importance of nuclear speckles for expression phenotypes and patient outcomes extends well beyond ccRCC and may be a novel therapeutic target for many cancer types.

### The Speckle Signature Exists Among Many Cancer Types.

[0318] Although speckle-resident proteins are mutated in cancers and developmental disorders, methods to systematically evaluate nuclear speckle phenotypes in altered states are lacking. A characterization of nuclear speckle variation was undertaken in human cancer, utilizing RNA expression of genes encoding speckle-resident proteins as a proxy for speckle phenotypes. 446 speckle-resident proteins were extracted based on speckle-localization annotations from the Human Protein Atlas (FIG. 55A) and estimated speckle phenotypes from their RNA expression in The Cancer Genome Atlas (TCGA) using Principal Component Analysis (PCA). Comparing speckle protein gene expression contributions to patient variation between cancer types (derived from PCA analysis), remarkable correlations were observed between cancer types (FIG. 55A, strong correlations are orange and red), indicating that speckle protein gene expression varies reproducibly in cancer.

[0319] Based on this consistent speckle protein gene expression variation across many cancer types, a multi-cancer 117 gene “speckle signature” was generated containing speckle protein genes that consistently contributed to patient variation (FIG. 55A). This included 40 “Signature I-high” speckle protein genes and 77 “Signature 11-high” speckle protein genes that were consistently reciprocally expressed, and that separated tumor samples into two groups (FIG. 55B). Each patient was assigned a speckle signature score based on the collective expression of these 117 speckle protein genes (FIG. 55B, speckle score on the left colored column of each heatmap) and used this quantitative measure for Kaplan-Meier survival analysis. Overall and disease-specific survival was assessed, separating patients by the top versus bottom quartiles of speckle scores. Of 24 cancers with highly consistent speckle protein gene contributions to patient variation (right grey bar in FIG. 55A), 21 showed no correlation between speckle signature and patient outcomes for any survival measurement, as shown by examples of melanoma (SKCM) and breast cancer (BRCA) (FIG. 55C, left panels), and two, ovarian (OV) and head and neck cancer (HNSC), showed modest survival correlations.

[0320] As an additional method to investigate whether speckles vary among individuals of cancer types beyond ccRCC, speckle protein gene expression patterns for 19 additional cancer types was assessed using RNA-seq data from The Cancer Genome Atlas (downloaded through cBioPortal in 2018). For each cancer type, the speckle protein genes that contribute the most to patient variation were extracted by taking the speckle protein genes with the highest rotation values in principle component 1 from principal component analysis (FIGS. 37A-37E). Similar to ccRCC, this analysis revealed two reciprocally-expressed groups of speckle protein genes among tumor samples. Comparing the groups of genes between cancer types, a high degree of overlap from cancer type to cancer type was observed. The two speckle protein groups in each cancer type were therefore assigned to speckle Signature I or Signature II, defining Signature II as the speckle protein group containing the protein SON, and calculated the significance of speckle protein gene overlap for each pairwise comparison of the 20 cancer types, including ccRCC (called kirc in TCGA data). In 19 of the 20 cancer types, a substantial overlap was found between the different cancer types, both in the speckle protein genes from speckle Signature I (FIGS. 38A-38D), and those from speckle Signature II (FIG. 39). This finding demonstrates that the two speckle signatures are reproducibly found across many cancer types. This discovery enabled the definition of a set of 18 speckle protein genes that were found in speckle Signature I or speckle Signature II in nearly all cancer types (at least 16 of 20), constituting a minimal speckle signature that is sufficient to separate patients into the speckle signature groups.

[0321] The finding that the speckle signature is consistent across cancer types also allowed for the identification of what genes in the genome are highly correlated with speckle signature irrespective of the cancer type. This involved assigning each patient a speckle score based on speckle protein gene expression (see “Using speckle signature as a prognostic indicator”), and calculating the Spearman's correlation coefficient between the speckle score and gene expression of every gene in the genome. This analysis revealed the most highly correlated genes with the speckle signature, including GADD45GIP1 and LATS1 (FIG. 27). As the speckle prognostic portions of the present invention are developed further, these observations will be of particular use to define a minimal set of genes that is capable of separating patients by speckle signature groups.

### Speckle Signature Predicts Patient Outcomes Depending on Mutation Status.

[0322] Separating patients by speckle signature did not reveal any other cancer types other than ccRCC (kirc) among the TCGA PANCAN dataset where speckle signature was predictive of overall patient survival. Without wishing to be bound by theory, it was hypothesized that this was because ccRCC has more homogenous etiologies as compared to other cancer types, with nearly all patients displaying hyperactive HIF2A. Therefore, to obtain an indication of whether speckle signature predicts patient outcomes in particular cancer subclasses, each cancer type was separated based on the top mutated genes within the cancer. In doing so, five additional cases were identified where speckle signature predicted or informed patient outcomes, detailed below. Notably not all cancer subtypes have been exhaustively analyzed. Hence, there are likely many more circumstances where speckle signature predicts patient outcomes.

[0323] These studies found that speckle signature predicts patient outcomes in the following cases:
[0324] 1. In KMT2D wild type melanoma, speckle Signature I is associated with poorer survival (p<0.01), while in KMT2D mutant melanoma, speckle Signature II trends towards poorer survival (p<0.1) (FIG. 28). Note that KMT2D is an STM-containing co-activator. Hence, compositions and methods that target the speckle associating abilities or that target the speckle signature may be effective.
[0325] 2. In BRAF wild type thyroid cancer, speckle Signature II is associated with poorer survival (p<0.01; FIG. 29). This case together with TTN wild type lung adenocarcinoma, below, provides an application for shifting the speckle signature from Signature I to Signature II.
[0326] 3. In PIK3R1 mutant endometrial cancer, speckle Signature I is associated with poorer survival (p<0.05; FIG. 30). This poor prognosis of speckle Signature I is similar to the ccRCC example, with similar methods potentially applicable
[0327] 4. In TTN wild type lung adenocarcinoma, speckle Signature II is associated with poorer survival (p<0.05), while in TTN mutant lung adenocarcinoma, speckle Signature I trends towards poorer survival (p<0.1) (FIG. 31). TTN is a speckle target motif-containing protein. However, it is also highly correlated with mutational burden in cancer. This is particularly important for lung adenocarcinoma, which separates into non-smokers with low mutational burden and smokers with high mutational burden. Thus, it is possible that our findings here reflect differences of patient survival in the subgroup non-smoker lung adenocarcinoma patients. This line of reasoning provides rationale for investigating the importance of speckle signature for cancer subtypes defined by variables other than the top mutated genes.
[0328] 5. Lung adenocarcinoma with mutant p53 has worse prognosis than those with wild type p53 specifically in patients with speckle Signature I (FIG. 32).

[0329] In total, the identification of several subtypes of cancer where speckle signature is predictive of patient survival indicates a high potential for speckle targeting therapies to become therapeutic strategies. Meanwhile, the speckle signature provides a new prognostic method for identifying high-risk patients who may benefit from particular treatment options.

### Example 5: Nuclear Speckle Positioning Predicts Patient Prognosis in Clear Cell Renal Cell Carcinoma

[0330] The data presented in the present disclosure demonstrates that positioning of genes in relation to nuclear speckles is a novel mechanism of gene regulation utilized by transcription factors (ie. p53 in Alexander et al., 2021 and HIF2A in the present disclosure). Additionally, these data demonstrated that nuclear speckle expression patterns, as assessed in RNA-seq data, are predictive of patient survival in VHL mutant clear cell renal cell carcinoma, KMT2D wild type melanoma, BRAF mutant thyroid cancer, PIK3KR1 mutant endometrial cancer, and TTN wild type lung adenocarcinoma (see previous discloser Example 4). In addition, speckle expression patterns informed survival prediction in lung adenocarcinoma separated by p53 mutation status. Based on these data, and without wishing to be bound by theory, it was hypothesized that nuclear speckles may serve as a prognostic indicator depending on the underlying transcriptional and mutation cancer dependencies. Particularly in clear cell renal cell carcinoma, which is characterized by hyperactivation of the speckle-targeting transcription factor HIF2A, which involves inactivating mutations of the VHL protein. Previous RNA-based estimations of nuclear speckle phenotypes can be limited because they 1) were an indirect assessment of nuclear speckle phenotypes, and 2) lacked scalability to enable large-scale application of a prognostic method. In this example, these limitations were addressed by applying an immunofluorescence-based protocol to directly visualize nuclear speckles in FFPE tissue sections, which are routinely collected for pathology in the clinic. It was unexpectedly discovered that the radial positioning of speckles within tumor cell nuclei was highly predictive of survival in clear cell renal cell carcinoma, providing a robust immuno-based imaging assay to classify high-risk patients based on their nuclear speckle phenotype (see FIG. 40).

Radial Positioning of Nuclear Speckles within the Cell Nucleus Predicts ccRCC Patient Outcomes

[0331] To determine whether nuclear speckle phenotypes predict patient outcomes in clear cell renal cell carcinoma (ccRCC), a tissue microarray containing 90 ccRCC tissue samples and 90 matched adjacent tissues was obtained, of which 77 had associated patient survival data. Immunofluorescence of the well-established speckle marker protein SON was then employed, together with DAPI staining, followed by imaging the entirety of each sample at 20× magnification. The correlation between speckle phenotypes and patient outcomes was then assessed. From each sample, per-nucleus SON intensity, texture, and radial distribution measurements was assessed, for a total of 79 SON-related measurements, which were used to calculate Kaplan Meier statistics by splitting the patient population into the top and bottom half based on the median value of all nuclei within the sample. Using this method, it was found that none of the intensity or texture measurements of SON immunofluorescence significantly (p<0.01) predicted ccRCC patient survival (FIG. 50). In contrast, several measurements of SON radial positioning were significantly correlated with survival (FIG. 50 and FIG. 41).

[0332] Radial distribution measurements were performed by binning the nucleus into four bins, the innermost (bin 1 of 4) to the outermost bin (bin 4 of 4), and calculating the fraction of signal (FractAtD), the mean fractional intensity (MeanFrac), or the coefficient of variation (radialCV) of SON signal within each bin. Specifically, it was found that ccRCC patients with high fraction of SON signal at the center of the nucleus (FractAtD 1 of 4) displayed favorable survival, while ccRCC patients with low fraction of SON signal at the center of the nucleus displayed unfavorable survival (FIG. 41, left; p<0.0001). Consistently, patients with high fraction of SON at the periphery of the nucleus (FractAtD 4of4) showed less favorable outcomes as compared to patients with low fraction of SON at the periphery of the nucleus (FIG. 41, right; p=0.00034). Examples of ccRCC tumor samples with high central SON or high peripheral SON are shown in FIG. 46. These findings demonstrate that central positioning of speckles within the cell nucleus is associated with favorable outcomes in ccRCC, while peripheral positioning of speckles within the cell nucleus is associated with poor outcomes.

[0333] Another study was performed which directly compared RNA- and imaging-based measurements of speckle phenotype in the same cohort of samples, with the hypothesis that samples with lower central SON would correspond to Signature I speckle protein gene expression. Thus, clinical ccRCC tumor and tumor-adjacent samples were obtained and divided in order to perform both RNA-seq and FFPE SON immunofluorescence (FIG. 52A, left schematic), including three tumor-adjacent primary tubule renal epithelium samples, three primary human ccRCC tumors, and four patient-derived mouse xenograft ccRCC tumors derived from the human individual. First, speckle protein gene expression scores were calculated via RNA-seq as previously described herein, and then the same tissue/tumor was imaged. Primary renal tubule epithelial samples (normal adjacent) displayed Signature II speckle scores and high central SON by imaging (FIG. 52A; dark, lower-right points; N—normal primary renal tubule epithelium), while two primary ccRCC tumors also showed Signature II speckle scores with high central SON (FIG. 52A; light points; T—primary tumor); the remaining primary ccRCC tumor and all four patient-derived xenograft samples showed the opposite Signature I speckle scores, with corresponding low central SON (FIG. 52A; see yellow primary tumor point and dark, upper left xenograft points (Tx) on upper left portion of graph). These direct comparisons indicate that speckle Signature I manifests as more spread out/less central speckles, associated with worse ccRCC survival (e.g. FIG. 47, top), while, in contrast, speckle Signature II manifests as central larger speckles associated with better ccRCC survival (e.g., FIG. 47, bottom). Therefore, these data directly link RNA-seq and imaging-based speckle phenotypes, demonstrating that they may be used interchangeably, adding to potential therapeutic relevance.

Speckle Signature Correlates with ccRCC Tumor/Patient Drug Response

[0334] Without wishing to be bound by theory, it is envisioned that having both RNA- and imaging-based methods for measuring speckle phenotypes will assist in the development of cancer- and patient-specific treatment strategies. As a proof-of-concept for a potential use of nuclear speckle phenotyping, a series of studies was undertaken in which speckle signature was correlated with tumor/patient drug response in available data from a human clinical trial and patient-derived mouse xenograft studies.

[0335] Comparing RNA speckle signature between xenograft tumors that were sensitive or resistant to the PT2399 HIF-2a inhibitor, it was found that ˜75% of Signature I tumors were sensitive to PT2399, while only ˜30% of Signature II tumors were sensitive (FIG. 52B), suggesting that Signature I tumors were more likely to be sensitive to HIF-2a inhibition. As a second potential application, it was found that in a ccRCC clinical trial comprised of mTOR inhibitor (everolimus) and PD1 inhibitor (nivolumab) arms, Signature I patients did not differ in overall survival between the two treatment groups, while Signature II patients had higher overall survival probability when treated with nivolumab compared to everolimus (FIG. 52C). Thus, contrasting with HIF-2a inhibition, PD1 inhibition may have a greater impact in individuals with Signature II tumors. Without wishing to be bound by theory, these findings suggest differential drug sensitivities depending on tumor speckle signatures, emphasizing the need and potential utility of evaluating how speckles relate to tumor/patient drug responses.

High Grade ccRCC have Less Central and More Peripheral Nuclear Positioning of Speckles

[0336] Studies next compared the radial positioning of SON signal between matched adjacent tissue and ccRCC tissue separated by tumor grade. Compared to adjacent tissues, ccRCC tumor samples had less central SON (FIG. 47, left) and more peripheral SON (FIG. 47, right). The fraction of SON signal in the center of the nucleus also decreased with tumor grade (compare G1 with G3). Reciprocally the fraction of SON signal in the periphery of the nucleus increased with tumor grade. Hence nuclear speckle positioning becomes dysregulated in ccRCC compared to adjacent tissue, and this dysregulation becomes more severe in later grade tumors.

Radial Positioning of Speckles within the Nucleus is Predictive of ccRCC Survival in Low Grade ccRCC

[0337] While later grade ccRCC displayed the most dramatic differences in radial distribution of nuclear speckles as compared to adjacent tissue, early stage ccRCC displayed a distribution of speckle positioning. To determine whether speckle positioning within early grade tumors is predictive of survival, survival analysis was performed including only Grade 1 and Grade 2 tumors (G1, G1/G2, and G2). It was found that nuclear speckle radial distribution still predicted patient outcomes in lower grade ccRCC (FIG. 48). These results demonstrate that the poor outcome of tumors with low central speckle positioning can be predicted at early stage ccRCC. This finding is critical because it enables classification of patient risk groups at early clinical stages based on nuclear speckle phenotypes.

### Stratification of High-Risk Nuclear Speckle Radial Positioning

[0338] To examine whether a particular nuclear speckle signal radial positioning cutoff could be used to stratify high-risk ccRCC patients, studies then evaluated Kaplan Meier statistics using different values for the fraction of SON in the center of the nucleus (FractAtD1of4), which was most predictive of patient outcomes when patients were split into the top and bottom 50% based on this measurement. It was found that splitting patients at a SON FractAtD1of4 of 0.0615 had the most significant Kaplan Meier p-value for early stage ccRCC (p=0.00012), and thus may serve as a reference point for risk assessment. Ten percent of the matched adjacent tissue samples (9 of 90) and 44.4% of the ccRCC samples (40 of 90) were found to be below this reference value. These metrics provide guidance for setting thresholds for classifying high-risk ccRCC patients.

Additional Predictors of ccRCC Patient Outcomes

[0339] To quantify the effect of nuclear speckle radial positioning, and to assess the impact of different variables on ccRCC outcome predictions, a Cox proportional hazards model was generated. It was found that subject age, radial distribution of SON signal (FractAtD1of4 for SON), and the coefficient of variation for the central DAPI radial fraction (RadialCV1of4 for DAPI) were each separately predictive of ccRCC patient outcomes, and together were highly predictive of ccRCC patient outcomes as assessed by the model (FIG. 49). These results demonstrate that SON radial positioning is predictive of ccRCC outcomes even when subject age is accounted for, and illustrate a method to refine patient risk classification by combining information from speckle positioning with the simultaneously-collected DNA staining data.

### Speckle Signature I Tumors are Enriched in Oxidative Phosphorylation and Ribosome Pathways

[0340] The speckle signature, while present in many cancers, was particularly predictive of survival in ccRCC (see FIG. 55). Given the findings presented herein that HIF-2a regulates DNA-speckle association, we hypothesized that HIF-2a combines with speckle phenotypes, resulting in poor ccRCC outcomes. To broadly understand the consequences of cancer speckle signature, attention was shifted to deeper analysis of gene expression differences between speckle signature patient groups in TCGA data. TCGA samples were divided into Signature I and Signature II groups using the top and bottom 25% of sample speckle scores (from FIG. 55; Signature I—top 25%, Signature II—bottom 25%), calculated gene expression fold changes, and used Gene Set Enrichment Analysis (GSEA) to identify which biological pathways were differential between the two patient groups. We found striking enrichment of “Oxidative phosphorylation” and “Ribosome” in the Signature I group among all cancer types, including ccRCC (KIRC) (FIGS. 56A-56B). Hence, across many cancer types, speckle Signature I correlates with increased oxidative phosphorylation and ribosomal pathways, suggesting that speckle Signature I tumors, which reflect the aberrant cancer speckle signature, may exist in a “hyper-productive” state with enhanced metabolic and protein production capacity. Based on these findings, and without wishing to be bound by theory, it is hypothesised that while speckle signature does not correlate with overall survival in all cancer types, it may broadly predict responses to therapy, particularly therapies that target metabolism and protein production pathways.

Methods Details for this Example

[0341] Antibody staining of FFPE tissue sections. The tissue array, HKID-CRC180SUR-01 contain 90 ccRCC samples and 90 matched adjacent 5 micron tissue sections with associated survival and grade data was obtained from USBioMax and stained for nuclear speckles using the following method. The slide was baked for 2 hours at 60° C. to help tissues sections adhere to the slide and deparaffinized and re-hydrated with 3×5 minute washes in Xylenes, 2×10 minute washes each in 100%, 95%, 80%, 70%, and 50% ethanol, 2×5 minute washes in deionized water. Antigen retrieval was performed in 1×HIER antigen retrieval buffer (ab208572) for 5 minutes in a pressure cooker. The slide was washed 2×5 minutes in deionized water, then blocked for 90 minutes in 10% goat serum in PBS with 0.2% Triton X-100. Primary antibody (SON; ab121759) was applied at a 1:100 dilution in 1% goat serum in PBS with 0.2% Triton X-100 and incubated overnight in a humidified chamber. The slide was washed 2×10 minutes in 1% goat serum in PBS with 0.2% Triton X-100, and the slide was incubated in secondary antibody (ThermoFisher A-21245) for one hour at room temperature. The slide was washed for 10 minutes in 1% goat serum in PBS with 0.2% Triton X-100, then DAPI stained at a final concentration of 0.2 ug/mL for 10 minutes in 1% goat serum in PBS with 0.2% Triton X-100, then washed 2×10 minutes in 1% goat serum in PBS with 0.2% Triton X-100. Excess liquid was drained from the slide, mounting media (20 mM Tris pH 8.0, 0.5% N-propyl gallate, 90% Glycerol) was added to cover tissue sections, a coverslip was placed over the mounting media, and the coverslip was sealed with nail polish.

[0342] Imaging. Tissue sections were scanned at 20× magnification on a wide-field Nikon 2iE microscope (objective lens: CFI60 Plan Apochromat Lambda 20× Objective Lens, N.A. 0.75, W.D. 1.0 mm, F.O.V. 25 mm, DIC, Spring Loaded) with 7 optical sections, imaging over 2000 nuclei per sample, and covering the entirety of the tissue section.

[0343] Analysis. Maximum Z projections were made using CellProfiler with the module “MakeProjection” with the Type of projection set to “Maximum”, and saved using the module “SaveImages”. Using the resultant maximum projections as input, the following steps were performed in CellProfiler: uneven illumination was calculated and corrected using modules “CorrectIlluminationCalculate” and “CorrectIlluminationApply”, and nuclei were segmented using “IdentifyPrimaryObjects” on the DAPI signal. Per-nucleus intensity, radial distribution, and texture measurements were performed using the CellProfiler modules “MeasureObjectIntensity”, “MeasureObjectlntensityDistribution”, and “MeasureTexture” applied to the aforementioned nuclei objects. These per-nuclei measurements were performed for each of the 90 ccRCC and 90 matched adjacent tissues and exported. Next, the per-sample medians were calculated for each per-nucleus measurement, and Kaplan Meier statistics were performed by splitting ccRCC subjects based on the top and bottom 50% based on these median measurements.

[0344] Methods for determining speckle signature and TCGA survival analysis. Four-hundred and forty-six protein genes annotated as “Enhanced”, “Supported”, or “Approved” for subcellular localization within nuclear speckles were identified in The Human Protein Atlas and their upper-quartile normalized RNA expression was extracted from the 30 PanCan TCGA projects that had greater than 50 samples. Principal Component Analysis was then performed on these 446 speckle protein genes. In doing so, each speckle protein gene was assigned a weight (called rotation in the analysis) that was used in the analysis to separate tumor sample along the first Principal Component (PC1). The absolute value of a speckle protein gene PC1 weight thus estimates the contribution of each speckle protein gene to patient variation and the PC1 weight sign, positive or negative, reflects genes that have opposite expression patterns to one another. To compare speckle protein gene expression contributions to patient variation between cancer types, the pairwise Pearson's correlation coefficients of the speckle protein PC1 weights were used. In order to obtain a set of speckle protein genes that consistently contributed to patient variation in many cancer types, the rotation signs were flipped so that the speckle protein gene, SON, was always assigned a negative weight. The speckle protein genes that had consistently signed rotations were then extracted across 22 cancer types (the 22 cancer types that showed highly similar speckle protein gene PC1 weights to one taking the z-scores of speckle protein gene expression, calculated per cancer, and applying the following formula: sum((z-score Sig I speckle protein gene)*1/(number Sig I speckle protein genes))+sum((z-score Sig II speckle protein gene)*−1/(number Sig II speckle protein genes). In this manner a speckle score was assigned to samples so that it would be strongly positive for tumors with the strongest Signature I expression pattern and strongly negative for tumors with the strongest Signature II expression pattern. Speckle score was then used to separate samples into groups for Kaplan Meier and gene expression analysis between the two groups. With collected ccRCC samples and published drug response studies, speckle scores were calculated using the above formula. In drug-response data (related to FIG. 52), samples with positive speckle scores were considered speckle Signature I and samples with negative speckle scores were considered speckle Signature II. Then differences in drug responses were calculated using a Fisher's exact test (FIG. 53) or Kaplan Meier statistics (FIG. 54).

### Example 6: Nuclear Speckle Positioning Predicts Patient Prognosis in Neuroblastoma

[0345] Without wishing to be bound by theory, it was hypothesized that the findings disclosed herein, where speckle score can be demonstrated to correlated with patient prognosis can be applied to different types of cancer. Having demonstrated a strong correlation in ccRCC, a studies was then carried out which used the speckle signature determining techniques disclosed herein to correlate survival and speckle score in neuroblastoma, a mostly pediatric cancer that develops in certain types of nervous tissues. RNA-seg and survival data from the TARGET 2018 study was analyzed and found to show that the speckle signature correlates with patient outcomes (FIG. 51), thus demonstrating the applicability of these methods to different kinds of cancer.

### Enumerated Embodiments

[0346] The following enumerated embodiments are provided, the numbering of which is not to be construed as designating levels of importance.

[0347] Embodiment 1 provides a polypeptide inhibitor of transcription factor/DNA-speckle association comprising a first polypeptide domain, a second polypeptide domain, and a third polypeptide domain, wherein:
[0348] a. the first polypeptide domain comprises a cell penetrating peptide;
[0349] b. the second polypeptide domain comprises a linker region; and
[0350] c. the third polypeptide domain comprises a DNA-speckle targeting motif.

[0351] Embodiment 2 provides the polypeptide of embodiment 1, wherein the cell penetrating peptide is selected from the group consisting of an HIV TAT peptide, a penetratin peptide, an R8 peptide, a transportan peptide, a cyclic R8 peptide, a cyclic TAT peptide, an HA-TAT peptide, and an xentry peptide.

[0352] Embodiment 3 provides the polypeptide of embodiment 2, wherein the cell penetrating peptide is an HIV TAT peptide.

[0353] Embodiment 4 provides the polypeptide of embodiment 3, wherein the HIV TAT peptide comprise an amino acid sequence of GRKKRRQRRRPQ (SEQ ID NO: 2603).

[0354] Embodiment 5 provides the polypeptide of embodiment 1, wherein the linker region comprises an amino acid sequence of GGSGGGSG (SEQ ID NO: 2604).

[0355] Embodiment 6 provides the polypeptide of embodiment 1, wherein the DNA-speckle targeting motif comprises a polypeptide sequence which is at least 62 amino acids.

[0356] Embodiment 7 provides the polypeptide of embodiment 6, wherein the polypeptide sequence comprises the pattern X1(30)-X2-P-X1(30), wherein
[0357] a. X1 is any amino acid; and
[0358] b. X2 is T, S, E, or D.

[0359] Embodiment 8 provides the polypeptide of embodiment 7, wherein the polypeptide sequence does not comprise four or more consecutive proline residues.

[0360] Embodiment 9 provides the polypeptide of embodiment 7, wherein the polypeptide sequence contains proline residues in a minimum of three of positions 16, 21, 36, 41, or 46.

[0361] Embodiment 10 provides the polypeptide of embodiment 7, wherein the polypeptide sequence comprises at least five negative or phosphorylatable amino acids.

[0362] Embodiment 11 provides the polypeptide of embodiment 10, wherein the negative or phosphorylatable amino acids are selected from the group consisting of D, E, T, and S.

[0363] Embodiment 12 provides the polypeptide of embodiment 7, wherein the polypeptide sequence comprises at least five small or hydrophobic amino acids.

[0364] Embodiment 13 provides the polypeptide of embodiment 12, wherein the small or hydrophobic amino acids are selected from the group consisting of A, M, V, F, L, and I.

[0365] Embodiment 14 provides the polypeptide of embodiment 7, wherein the polypeptide sequence comprises fewer than fifteen positively charged amino acids.

[0366] Embodiment 15 provides the polypeptide of embodiment 14, wherein the positively charged amino acids are selected from the group consisting of R, H, and K.

[0367] Embodiment 16 provides the polypeptide of embodiment 1, wherein the DNA-speckle targeting motif comprises an amino acid sequence set forth in any one of SEQ ID

[0368] Nos: 1-2602.

[0369] Embodiment 17 provides the polypeptide of embodiment 1, wherein the transcription factor is p53.

[0370] Embodiment 18 provides the polypeptide of embodiment 1, wherein the transcription factor is HIF2A.

[0371] Embodiment 19 provides a pharmaceutical composition comprising at least one polypeptide inhibitors of transcription factor/DNA-speckle association of any one of embodiments 1-18 and a pharmaceutically acceptable diluent or excipient.

[0372] Embodiment 20 provides a method for inhibiting transcription factor/DNA-speckle association in a cell, comprising contacting the cell with an effective amount of an inhibitor of transcription factor/DNA-speckle association, wherein the inhibitor is the polypeptide of any one of embodiments 1-18.

[0373] Embodiment 21 provides a method for inhibiting transcription factor/DNA-speckle association in a cell, comprising contacting the cell with an effective amount of an inhibitor of transcription factor/DNA-speckle association, wherein the inhibitor is a small molecule.

[0374] Embodiment 22 provides a method for inhibiting transcription factor/DNA-speckle association in a cell, comprising contacting the cell with an effective amount of an inhibitor of transcription factor/DNA-speckle association, wherein the inhibitor is a combination of a small molecule and the polypeptide of any one of embodiments 1-18.

[0375] Embodiment 23 provides a method of treating a DNA-speckle related cancer in a subject in need thereof, comprising administering to the subject an effective amount of the pharmaceutical composition of embodiment 19, thereby treating the cancer.

[0376] Embodiment 24 provides the method of embodiment 23, wherein the cancer is clear cell renal cell carcinoma (ccRCC).

[0377] Embodiment 25 provides the method of embodiment 23, wherein the cancer is selected from the group consisting of breast cancer, cervical squamous cell carcinoma, endocervical adenocarcinoma, colon adenocarcinoma, rectum adenocarcinoma, glioblastoma, head and neck squamous cell carcinoma, kidney renal papillary cell carcinoma, glioma, liver hepatocellular carcinoma, lung squamous cell carcinoma, lung adenocarcinoma, ovarian cancer, pheochromocytoma, paraganglioma, prostate adenocarcinoma, sarcoma, skin cutaneous melanoma, stomach adenocarcinoma, tenosynovial giant cell tumor, and thymoma.

[0378] Embodiment 26 provides a method of treating a DNA-speckle related cancer in a subject in need thereof, comprising administering to the subject an effective amount of the polypeptide of any one of embodiments 1-18, thereby treating the cancer.

[0379] Embodiment 27 provides the method of embodiment 27, wherein the cancer is clear cell renal cell carcinoma (ccRCC).

[0380] Embodiment 28 provides the method of embodiment 27, wherein the cancer is selected from the group consisting of breast cancer, cervical squamous cell carcinoma, endocervical adenocarcinoma, colon adenocarcinoma, rectum adenocarcinoma, glioblastoma, head and neck squamous cell carcinoma, kidney renal papillary cell carcinoma, glioma, liver hepatocellular carcinoma, lung squamous cell carcinoma, lung adenocarcinoma, ovarian cancer, pheochromocytoma, paraganglioma, prostate adenocarcinoma, sarcoma, skin cutaneous melanoma, stomach adenocarcinoma, tenosynovial giant cell tumor, and thymoma.

[0381] Embodiment 29 provides a method of generating peptide inhibitors of DNA speckle association, the method comprising:
[0382] a. screening a library of protein sequences for those comprising a DNA-speckle targeting motif comprising:
[0383] i. at least 62 contiguous amino acids;
[0384] ii. comprising the pattern X1(30)-X2-P-X1(30), wherein
[0385] iii. X1 is any amino acid; and
[0386] iv. X2 is T, S, E, or D;
[0387] v. does not comprise four or more consecutive proline residues;
[0388] vi. contains proline residues in a minimum of three of positions 16, 21, 36, 41, or 46;
[0389] vii. comprises at least five negative or phosphorylatable amino acids selected from the group consisting of D, E, T, and S;
[0390] viii. comprises at least five small or hydrophobic amino acids selected from the group consisting of A, M, V, F, L, and I; and
[0391] ix. comprises fewer than fifteen positively charged amino acids selected from the group consisting of R, H, and K;
[0392] b. identifying proteins comprising said motif sequence; and
[0393] c. generating peptides comprising said motif sequence.

[0394] Embodiment 30 provides the method of embodiment 29, wherein generating the peptide inhibitor further comprises adding a cell-permeability sequence to the DNA-speckle targeting motif sequence.

[0395] Embodiment 31 provides the method of embodiment 30, wherein the cell penetrating peptide is selected from the group consisting of an HIV TAT peptide, a penetratin peptide, an R8 peptide, a transportan peptide, a cyclic R8 peptide, a cyclic TAT peptide, an HA-TAT peptide, and an xentry peptide.

[0396] Embodiment 32 provides the method of embodiment 31, wherein the cell penetrating peptide is an HIV TAT peptide.

[0397] Embodiment 33 provides the method of embodiment 32, wherein the HIV TAT peptide comprise an amino acid sequence of GRKKRRQRRRPQ (SEQ ID NO: 2603).

[0398] Embodiment 34 provides the method of embodiment 29, wherein generating the peptide inhibitor further comprises adding a linker sequence between the cell-permeability sequence and the DNA-speckle targeting motif sequence.

[0399] Embodiment 35 provides the method of embodiment 34, wherein the linker region comprises an amino acid sequence of GGSGGGSG (SEQ ID NO: 2604).

[0400] Embodiment 36 provides a method of screening a tumor tissue to determine speckle signature score, comprising:
[0401] a. obtaining a specimen of tumor tissue;
[0402] b. isolating and purifying RNA from the specimen;
[0403] c. performing RNA-seq using the RNA to determine relative gene expression levels of Speckle signature genes;
[0404] d. determining the Z-score of each speckle signature gene;
[0405] e. for each speckle Signature I gene, divide its Z-score by the number of speckle protein genes in speckle Signature I, then take the sum of all these values for Signature I speckle protein genes;
[0406] f. for each speckle Signature II gene, divide its Z-score by the number of speckle protein genes in speckle Signature II, then take the sum of all these values for Signature II speckle protein genes; and
[0407] g. take the log(2) of the ratio of the result from step e to the result from step f thereby determining the speckle signature score of the specimen; wherein, samples with high positive values are strongly Signature I and samples with low negative values are strongly Signature II.

[0408] Embodiment 37 provides the method of embodiment 36, wherein the speckle signature comprises the genes FIBP, PQBP1, SART1, THRAP4, FASTK, C19ORF24, CDC34, FBXL4, WRN, RNF169, TRIP12, SON, RBM27, BCLAF1, PRPF4B, SETD2, RBM26, and EPC2.

[0409] Embodiment 38 provides the method of embodiment 36, wherein the genes comprising speckle Signature I are selected from the group consisting of VAX2, JDP2, PLEKHN1, HDAC5, C110RF49, SLC4A2, STYXL1, TMEM179B, TAB1, ZNF446, TBXA2R, UNC45A, PCBP1, PHLDB3, KTI12, AKAP17A, PRCC, ZNF821, SPINDOC, HSF4, DEXI, HEXIM2, EHMT2, VPS72, DDX39A, KIF22, DPCD, LHPP, CD2BP2, CDK11B, GTF2H4, DGKZ, SARNP, ALYREF, SLC2A4RG, TEPSIN, AKAP8L, PPIE, STK19, FIBP, C60RF226, H2AFX, EGFL8, PSMD13, CACTIN, EXOSC7, C120RF57, THAP4, TMEM259, THOC6, AP5Z1, PQBP1, RBM10, C1ORF35, C19ORF24, SART1, CDC34, FASTK, POMP, PRPF6, PRPF19, BRK1, UFC1, SNRPA1, ZCCHC17, SNRPB2, PCP2, SSH3, SETD1A, WDR90, THEM6, U2AF2, RBM14, MAST3, LIMK1, SF3B4, DDX39B, RTEL1, ZNF165, MAPK12, PSMD8, CDK5RAP1, PDZK1IP1, SETD4, CHTOP, CDK11A, SRSF4, TBX19, RTN2, CCDC32, CYSRT1, IQCK, MPP1, MAMSTR, ILRUN, DBNDD1, EPHB6, TCF15, C60RF52, CYGB, CCDC85C, PHYHD1, ITPKC, CDC25C, RMI2, SNRNP40, HISTIHIE, ZC3H18, SON, RBM27, TCF12, BCLAF1, ERBIN, SETD2, TCP11L2, EPC2, TRIP12, YLPM1, LMTK2, GPATCH8, DDX46, PRPF4B, TAB3, EPG5, RSBN1L, SF3B1, PUS7L, KCTD20, RBM26, BAZ2A, RBM41, RREB1, ZNF621, FAM160B1, CDK13, SDE2, DHX15, PRPF40A, CHIC1, SREK1, LIN52, BARD1, ZNF441, GNAQ, THRAP3, HBP1, SMC5, PPP4R3B, RBBP6, TTC26, COG6, ZC3H14, UBE3B, MRTFB, YTHDF3, UBE4A, CBLL1, API5, CMTR2, TBC1D12, WRN, KIAA1328, TMEM209, ZCCHC4, MAPK14, ZNF160, SLU7, ERCC8, FOXJ3, PCLO, RSRC1, ZC3H11A, BMP2K, RALGAPB, FBXL4, RTL6, RCAN3, FBXO34, ZBTB8A, CWF19L2, SRRM2, HELQ, FYTTD1, PPIG, ANKRD44, SOCS6, S100PBP, ZNF304, ZNF543, RBM25, EFCAB13, CPD, ARMCX5, POLI, ZNF551, MAML3, POLR3B, SFMBT2, DDX17, RNF169, KAT6A, DDX42, GPATCH2, CBFA2T2, E2F3, ZNF169, TAF5L, KIAA0100, PRKAA1, LHX4, RSRC2, CSRNP2, NCBP3, NCAPG2, SF3A1, DENNDlB, BRD2, PNISR, E2F7, LRRC8B, PACSIN2, PNN, KIAA0556, SAP130, CPSF6, MAP3K7, TADA2A, HP1BP3, ZNF217, BRD1, SRRM1, SRSF11, GLYR1, FAM227B, AAGAB, PLRG1, FCHSD2, MECOM, TMEM56, CDYL, ELOA, STK17A, RIOK1, ARHGAP42, R3HCC1L, COPS4, BORCS7, THOC1, CIR1, PYROXD1, ARHGAP18, NSL1, WTAP, ZNHIT6, BCAS2, HAUS6, MORF4L1, SMC4, MBD4, PRPF18, CWC22, UBAP2L, SMURF2, KDM6B, PRKAA2, LIFR, RBM8A, SNURF, DAZAP2, FAM120C, WDR17, ZDHHC15, GTF2H2C, SRGAP1, ZSWIM5, RAF1, ZNF286B, ZNF528, ZNF572, ZNF527, XYLB, FNBP4, PRPF4, SIPA1L3, ZNF382, RFXAP, RBM39, CWC25, ZIM2, ANXA9, MFSD11, BPNT1, GPN3, MAPT, PPP1R16B, ZNF250, RAD52, ZNF786, GNB5, MNS1, TARBP1, RBM6, PRKN, ZCWPW2, MAMDC2, IPCEF1, NFATC4, LPAR1, VXN, FAM107A, IL16, USP22, RNF112, CRY2, PLAGI, IQUB, PPP1R8, BNIP3L or any combination thereof.

[0410] Embodiment 39 provides the method of embodiment 36, wherein the genes comprising speckle Signature II are selected from the group consisting of SON, RBM27, TCF12, BCLAF1, ERBIN, SETD2, TCP11L2, EPC2, TRIP12, YLPM1, LMTK2, GPATCH8, DDX46, PRPF4B, TAB3, EPG5, RSBN1L, SF3B1, PUS7L, KCTD20, RBM26, BAZ2A, RBM41, RREB1, ZNF621, FAM160B1, CDK13, SDE2, DHX15, PRPF40A, CHIC1, SREK1, LIN52, BARD1, ZNF441, GNAQ, THRAP3, HBP1, SMC5, PPP4R3B, RBBP6, TTC26, COG6, ZC3H14, UBE3B, MRTFB, YTHDF3, UBE4A, CBLL1, API5, CMTR2, TBC1D12, WRN, KIAA1328, TMEM209, ZCCHC4, MAPK14, ZNF160, SLU7, ERCC8, FOXJ3, PCLO, RSRC1, ZC3H11A, BMP2K, RALGAPB, FBXL4, RTL6, RCAN3, FBXO34, ZBTB8A, CWF19L2, SRRM2, HELQ, FYTTD1, PPIG, ANKRD44, SOCS6, S100PBP, ZNF304, ZNF543, RBM25, EFCAB13, CPD, ARMCX5, POLI, ZNF551, MAML3, POLR3B, SFMBT2, DDX17, RNF169, KAT6A, DDX42, GPATCH2, CBFA2T2, E2F3, ZNF169, TAF5L, KIAA0100, PRKAA1, LHX4, RSRC2, CSRNP2, NCBP3, NCAPG2, SF3A1, DENND1B, BRD2, PNISR, E2F7, LRRC8B, PACSIN2, PNN, KIAA0556, SAP130, CPSF6, MAP3K7, TADA2A, HP1BP3, ZNF217, BRD1, SRRM1, SRSF11, GLYR1, FAM227B, AAGAB, PLRG1, FCHSD2, MECOM, TMEM56, CDYL, ELOA, STK17A, RIOK1, ARHGAP42, R3HCC1L, COPS4, BORCS7, THOC1, CIR1, PYROXD1, ARHGAP18, NSL1, WTAP, ZNHIT6, BCAS2, HAUS6, MORF4L1, SMC4, MBD4, PRPF18, CWC22, UBAP2L, SMURF2, KDM6B, PRKAA2, LIFR, RBM8A, SNURF, DAZAP2, FAM120C, WDR17, ZDHHC15, GTF2H2C, SRGAP1, ZSWIM5, RAF1, ZNF286B, ZNF528, ZNF572, ZNF527, XYLB, FNBP4, PRPF4, SIPA1L3, ZNF382, RFXAP, RBM39, CWC25, ZIM2, ANXA9, MFSD11, BPNT1, GPN3, MAPT, PPP1R16B, ZNF250, RAD52, ZNF786, GNB5, MNS1, TARBP1, RBM6, PRKN, ZCWPW2, MAMDC2, IPCEF1, NFATC4, LPAR1, VXN, FAM107A, IL16, USP22, RNF112, CRY2, PLAGI, IQUB, PPP1R8, BNIP3L, VAX2, JDP2, PLEKHN1, HDAC5, C11ORF49, SLC4A2, STYXL1, TMEM179B, TAB1, ZNF446, TBXA2R, UNC45A, PCBP1, PHLDB3, KTI12, AKAP17A, PRCC, ZNF821, SPINDOC, HSF4, DEXI, HEXIM2, EHMT2, VPS72, DDX39A, KIF22, DPCD, LHPP, CD2BP2, CDK11B, GTF2H4, DGKZ, SARNP, ALYREF, SLC2A4RG, TEPSIN, AKAP8L, PPIE, STK19, FIBP, C60RF226, H2AFX, EGFL8, PSMD13, CACTIN, EXOSC7, C120RF57, THAP4, TMEM259, THOC6, AP5Z1, PQBP1, RBM10, C1ORF35, C19ORF24, SART1, CDC34, FASTK, POMP, PRPF6, PRPF19, BRK1, UFC1, SNRPA1, ZCCHC17, SNRPB2, PCP2, SSH3, SETD1A, WDR90, THEM6, U2AF2, RBM14, MAST3, LIMK1, SF3B4, DDX39B, RTEL1, ZNF165, MAPK12, PSMD8, CDK5RAP1, PDZK1IP1, SETD4, CHTOP, CDK11A, SRSF4, TBX19, RTN2, CCDC32, CYSRT1, IQCK, MPP1, MAMSTR, ILRUN, DBNDD1, EPHB6, TCF15, C60RF52, CYGB, CCDC85C, PHYHD1, ITPKC, CDC25C, RMI2, SNRNP40, HISTIHIE, ZC3H18.

[0411] Embodiment 40 provides a method of treating a Speckle signature associated cancer in a subject in need thereof, comprising:
[0412] a. obtaining a specimen of tumor tissue;
[0413] b. isolating and purifying RNA from the specimen;
[0414] c. performing RNA-seq using the RNA to determine the speckle signature of the tumor tissue; and
[0415] d. administering an effective amount of an inhibitor of expression for at least one speckle signature gene, thereby treating the cancer;

[0416] Embodiment 41 provides the method of embodiment 40, further comprising determining the nuclear localization profile of at least one speckle signature gene.

[0417] Embodiment 42 provides the method of embodiment 41, wherein a radial nuclear localization profile correlates with worse prognosis.

[0418] Embodiment 43 provides the method of embodiment 41, wherein the at least one inhibited speckle gene is associated with speckle Signature I.

[0419] Embodiment 44 provides the method of embodiment 42, wherein the inhibition of at least one gene associated with Speckle Signature I shifts the Speckle signature of the tumor tissue to Speckle Signature II.

[0420] Embodiment 45 provides the method of embodiment 41, wherein the at least one inhibited Speckle gene is associated with Speckle Signature II.

[0421] Embodiment 46 provides the method of embodiment 44, wherein the inhibition of at least one gene associated with Speckle Signature II shifts the Speckle signature of the tumor tissue to Speckle Signature I.

[0422] Embodiment 47 provides the method of any one of embodiments 41-45, wherein shifting the Speckle signature of the tumor tissue improves prognosis.

[0423] Embodiment 48 provides the method of embodiment 41, wherein the cancer is selected from the group consisting of clear cell renal cell carcinoma, KMT2D wild type melanoma, TTN wild type lung adenocarcinoma, BRAF wild type thyroid cancer, and PIK3R1 mutant endometrial cancer.

[0424] Embodiment 49 provides the method of embodiment 41, wherein the inhibitor of Speckle signature gene expression is selected from the group consisting of an inhibitory RNA, a small molecule, a PROTAC, a CRISPR/Cas9 system, and any combination thereof.

[0425] Embodiment 50 provides the method of embodiment 48, wherein the inhibitory RNA is selected from the group consisting of an siRNA, and an shRNA or any combination thereof.

[0426] Embodiment 51 provides the method of embodiment 41, wherein the Speckle signature gene is SART1.

[0427] Embodiment 52 provides the method of embodiment 41, wherein the speckle signature gene is HBP1.

[0428] Embodiment 53 provides the method of embodiment 41, wherein the speckle signature gene is COPS4

[0429] Embodiment 54 provides the method of embodiment 41, wherein the speckle signature is determined by immunofluorescence of FFPE tumor samples.

[0430] Embodiment 55 provides the method of embodiment 41, wherein the speckle signature is determined by RNA or protein analysis of a subset of speckle protein genes comprising FIBP, PQBP1, SART1, THRAP4, FASTK, C19ORF24, CDC34, FBXL4, WRN, RNF169, TRIP12, SON, RBM27, BCLAF1, PRPF4B, SETD2, RBM26, EPC2, or any combination thereof.

[0431] Embodiment 56 provides a method of determining the prognosis of a speckle-related cancer in a subject in need thereof, comprising:
[0432] d. obtaining a specimen of cancer tissue;
[0433] e. preparing the tissue specimen such that nuclear localization of at least one speckle-related protein can be visualized and quantified; and
[0434] f. determining the nuclear localization profile of at least one speckle-related protein in the tissue, thereby indicating the severity of the speckle-related cancer;
[0435] wherein radial positioning speckle-related protein expression indicates a worse prognosis.

[0436] Embodiment 57 provides the method of embodiment 56, wherein the at least one speckle-related protein is selected from the group consisting of FIBP, PQBP1, SART1, THRAP4, FASTK, C19ORF24, CDC34, FBXL4, WRN, RNF169, TRIP12, SON, RBM27, BCLAF1, PRPF4B, SETD2, RBM26, EPC2, or any combination thereof.

[0437] Embodiment 58 provides the method of embodiment 56, wherein the at least one speckle-related protein is SON.

[0438] Embodiment 59 provides the method of embodiment 56, wherein the visualization and quantification of the speckle protein localization comprises immunofluorescence microscopy.

[0439] Embodiment 60 provides the method of embodiment 56, wherein the cancer is selected from the group consisting of clear cell renal cell carcinoma, KMT2D wild type melanoma, TTN wild type lung adenocarcinoma, BRAF wild type thyroid cancer, and PIK3R1 mutant endometrial cancer.

[0440] Embodiment 61 provides a method of treating a speckle-related cancer in a subject in need thereof, comprising:
[0441] c. performing RNA-seq using RNA purified from a tumor specimen from the subject to determine the speckle signature of the tumor tissue; and
[0442] d. administering an effective amount of an anticancer therapeutic, thereby treating the cancer;
[0443] wherein, the sensitivity of the tumor to the anticancer therapeutic correlates with the speckle signature of the tumor tissue.

[0444] Embodiment 62 provides the method of embodiment 61, further comprising determining the nuclear localization profile of nuclear speckles.

[0445] Embodiment 63 provides the method of embodiment 61, wherein the speckle signature is associated with speckle signature I.

[0446] Embodiment 64 provides the method of embodiment 61, wherein the speckle signature is associated with speckle Signature II.

[0447] Embodiment 65 provides the method of embodiments 61, wherein choosing a speckle signature correlated treatment strategy improves treatment prognosis.

[0448] Embodiment 66 provides the method of embodiment 61, wherein the cancer is selected from the group consisting of clear cell renal cell carcinoma, neuroblastoma, KMT2D wild type melanoma, TTN wild type lung adenocarcinoma, BRAF wild type thyroid cancer, and PIK3R1 mutant endometrial cancer.

[0449] Embodiment 67 provides the method of embodiment 61, wherein the cancer is clear cell renal cell carcinoma.

[0450] Embodiment 68 provides the method of embodiment 61, wherein the anticancer therapeutic is selected from the group consisting of a biologic, a small molecule, an immunotherapy, and any combination thereof.

[0451] Embodiment 69 provides the method of embodiment 67, wherein the immunotherapy is an immune checkpoint inhibitor.

[0452] Embodiment 70 provides the method of embodiment 68, wherein the immune checkpoint inhibitor is an inhibitor of PD-1.

[0453] Embodiment 71 provides the method of embodiment 69, wherein the PD-1 inhibitor is nivolumab.

[0454] Embodiment 72 provides the method of embodiment 61, wherein the anticancer therapeutic is an inhibitor of HIF-2a.

[0455] Embodiment 73 provides the method of embodiment 72, wherein the inhibitor of HIF-2a is PT2399.

[0456] Embodiment 74 provides the method of embodiment 62, wherein the speckle signature is determined by the nuclear localization profile of nuclear speckles.

[0457] Embodiment 75 provides the method of embodiment 74, wherein the nuclear localization profile is determined by immunofluorescence of FFPE tumor samples.

[0458] Embodiment 76 provides the method of embodiment 61, wherein the speckle signature is determined by RNA or protein analysis of a subset of speckle protein genes comprising FIBP, PQBP1, SART1, THRAP4, FASTK, C19ORF24, CDC34, FBXL4, WRN, RNF169, TRIP12, SON, RBM27, BCLAF1, PRPF4B, SETD2, RBM26, EPC2, or any combination thereof.

### OTHER EMBODIMENTS

[0459] The recitation of a listing of elements in any definition of a variable herein includes definitions of that variable as any single element or combination (or subcombination) of listed elements. The recitation of an embodiment herein includes that embodiment as any single embodiment or in combination with any other embodiments or portions thereof.

[0460] The disclosures of each and every patent, patent application, and publication cited herein are hereby incorporated herein by reference in their entirety. While this invention has been disclosed with reference to specific embodiments, it is apparent that other embodiments and variations of this invention may be devised by others skilled in the art without departing from the true spirit and scope of the invention. The appended claims are intended to be construed to Ie all such embodiments and equivalent variations.

What is claimed:

1. A polypeptide inhibitor of transcription factor/DNA-speckle association comprising a first polypeptide domain, a second polypeptide domain, and a third polypeptide domain, wherein:
a. the first polypeptide domain comprises a cell penetrating peptide;
b. the second polypeptide domain comprises a linker region; and
c. the third polypeptide domain comprises a DNA-speckle targeting motif.

2. The polypeptide of claim 1, wherein the cell penetrating peptide is selected from the group consisting of an HIV TAT peptide, a penetratin peptide, an R8 peptide, a transportan peptide, a cyclic R8 peptide, a cyclic TAT peptide, an HA-TAT peptide, and an xentry peptide.

3. The polypeptide of claim 2, wherein the cell penetrating peptide is an HIV TAT peptide.

4. The polypeptide of claim 3, wherein the HIV TAT peptide comprise an amino acid sequence of GRKKRRQRRRPQ (SEQ ID NO: 2603).

5. The polypeptide of claim 1, wherein the linker region comprises an amino acid sequence of GGSGGGSG (SEQ ID NO: 2604).

6. The polypeptide of claim 1, wherein the DNA-speckle targeting motif comprises a polypeptide sequence which is at least 62 amino acids.

7. The polypeptide of claim 6, wherein the polypeptide sequence comprises the pattern X₁(30)-X₂-P-X₁(30), wherein
a. X₁ is any amino acid; and
b. X₂ is T, S, E, or D.

8. The polypeptide of claim 7, wherein the polypeptide sequence does not comprise four or more consecutive proline residues.

9. The polypeptide of claim 7, wherein the polypeptide sequence contains proline residues in a minimum of three of positions 16, 21, 36, 41, or 46.

10. The polypeptide of claim 7, wherein the polypeptide sequence comprises at least five negative or phosphorylatable amino acids.

11. The polypeptide of claim 10, wherein the negative or phosphorylatable amino acids are selected from the group consisting of D, E, T, and S.

12. The polypeptide of claim 7, wherein the polypeptide sequence comprises at least five small or hydrophobic amino acids.

13. The polypeptide of claim 12, wherein the small or hydrophobic amino acids are selected from the group consisting of A, M, V, F, L, and I.

14. The polypeptide of claim 7, wherein the polypeptide sequence comprises fewer than fifteen positively charged amino acids.

15. The polypeptide of claim 14, wherein the positively charged amino acids are selected from the group consisting of R, H, and K.

16. The polypeptide of claim 1, wherein the DNA-speckle targeting motif comprises an amino acid sequence set forth in any one of SEQ ID Nos: 1-2602.

17. The polypeptide of claim 1, wherein the transcription factor is p53.

18. The polypeptide of claim 1, wherein the transcription factor is HIF2A.

19. A pharmaceutical composition comprising at least one polypeptide inhibitors of transcription factor/DNA-speckle association of claim 1 and a pharmaceutically acceptable diluent or excipient.

20. A method for inhibiting transcription factor/DNA-speckle association in a cell, comprising contacting the cell with an effective amount of an inhibitor of transcription factor/DNA-speckle association, wherein the inhibitor is the polypeptide of claim 1.

21. A method for inhibiting transcription factor/DNA-speckle association in a cell, comprising contacting the cell with an effective amount of an inhibitor of transcription factor/DNA-speckle association, wherein the inhibitor is a small molecule.

22. A method for inhibiting transcription factor/DNA-speckle association in a cell, comprising contacting the cell with an effective amount of an inhibitor of transcription factor/DNA-speckle association, wherein the inhibitor is a combination of a small molecule and the polypeptide of claim 1.

23. A method of treating a DNA-speckle related cancer in a subject in need thereof, comprising administering to the subject an effective amount of the pharmaceutical composition of claim 19, thereby treating the cancer.

24. The method of claim 23, wherein the cancer is clear cell renal cell carcinoma (ccRCC).

25. The method of claim 23, wherein the cancer is selected from the group consisting of breast cancer, cervical squamous cell carcinoma, endocervical adenocarcinoma, colon adenocarcinoma, rectum adenocarcinoma, glioblastoma, head and neck squamous cell carcinoma, kidney renal papillary cell carcinoma, glioma, liver hepatocellular carcinoma, lung squamous cell carcinoma, lung adenocarcinoma, ovarian cancer, pheochromocytoma, paraganglioma, prostate adenocarcinoma, sarcoma, skin cutaneous melanoma, stomach adenocarcinoma, tenosynovial giant cell tumor, and thymoma.

26. A method of treating a DNA-speckle related cancer in a subject in need thereof, comprising administering to the subject an effective amount of the polypeptide of claim 1, thereby treating the cancer.

27. The method of claim 26, wherein the cancer is clear cell renal cell carcinoma (ccRCC).

28. The method of claim 26, wherein the cancer is selected from the group consisting of breast cancer, cervical squamous cell carcinoma, endocervical adenocarcinoma, colon adenocarcinoma, rectum adenocarcinoma, glioblastoma, head and neck squamous cell carcinoma, kidney renal papillary cell carcinoma, glioma, liver hepatocellular carcinoma, lung squamous cell carcinoma, lung adenocarcinoma, ovarian cancer, pheochromocytoma, paraganglioma, prostate adenocarcinoma, sarcoma, skin cutaneous melanoma, stomach adenocarcinoma, tenosynovial giant cell tumor, and thymoma.

29. A method of generating peptide inhibitors of DNA speckle association, the method comprising:
a. screening a library of protein sequences for those comprising a DNA-speckle targeting motif comprising:
i. at least 62 contiguous amino acids;
ii. comprising the pattern X₁(30)-X₂-P-X₁(30), wherein
X₁ is any amino acid; and
X₂ is T, S, E, or D;
iii. does not comprise four or more consecutive proline residues;
iv. contains proline residues in a minimum of three of positions 16, 21, 36, 41, or 46;
v. comprises at least five negative or phosphorylatable amino acids selected from the group consisting of D, E, T, and S;
vi. comprises at least five small or hydrophobic amino acids selected from the group consisting of A, M, V, F, L, and I; and
vii. comprises fewer than fifteen positively charged amino acids selected from the group consisting of R, H, and K;
b. identifying proteins comprising said motif sequence; and
c. generating peptides comprising said motif sequence.

30. The method of claim 29, wherein generating the peptide inhibitor further comprises adding a cell-permeability sequence to the DNA-speckle targeting motif sequence.

31. The method of claim 30, wherein the cell penetrating peptide is selected from the group consisting of an HIV TAT peptide, a penetratin peptide, an R8 peptide, a transportan peptide, a cyclic R8 peptide, a cyclic TAT peptide, an HA-TAT peptide, and an xentry peptide.

32. The method of claim 31, wherein the cell penetrating peptide is an HIV TAT peptide.

33. The method of claim 32, wherein the HIV TAT peptide comprise an amino acid sequence of GRKKRRQRRRPQ (SEQ ID NO: 2603).

34. The method of claim 29, wherein generating the peptide inhibitor further comprises adding a linker sequence between the cell-permeability sequence and the DNA-speckle targeting motif sequence.

35. The method of claim 34, wherein the linker region comprises an amino acid sequence of GGSGGGSG (SEQ ID NO: 2604).

36. A method of screening a tumor tissue to determine speckle signature score, comprising:
a. obtaining a specimen of tumor tissue;
b. isolating and purifying RNA from the specimen;
c. performing RNA-seq using the RNA to determine relative gene expression levels of speckle signature genes;
d. determining the Z-score of each speckle signature gene;
e. for each speckle Signature I gene, divide its Z-score by the number of speckle protein genes in speckle signature I, then take the sum of all these values for Signature I speckle protein genes;
f. for each speckle Signature II gene, divide its Z-score by the number of speckle protein genes in speckle signature II, then take the sum of all these values for Signature II speckle protein genes; and
g. take the log(2) of the ratio of the result from step e to the result from step f thereby determining the speckle signature score of the specimen;
wherein, samples with high positive values are strongly Signature I and samples with low negative values are strongly Signature II.

37. The method of claim 36, wherein the speckle signature comprises the genes FIBP, PQBP1, SART1, THRAP4, FASTK, C19ORF24, CDC34, FBXL4, WRN, RNF169, TRIP12, SON, RBM27, BCLAF1, PRPF4B, SETD2, RBM26, and EPC2.

38. The method of claim 36, wherein the genes comprising speckle Signature I are selected from the group consisting of VAX2, JDP2, PLEKHN1, HDAC5, C110RF49, SLC4A2, STYXL1, TMEM179B, TAB1, ZNF446, TBXA2R, UNC45A, PCBP1, PHLDB3, KTI12, AKAP17A, PRCC, ZNF821, SPINDOC, HSF4, DEXI, HEXIM2, EHMT2, VPS72, DDX39A, KIF22, DPCD, LHPP, CD2BP2, CDK11B, GTF2H4, DGKZ, SARNP, ALYREF, SLC2A4RG, TEPSIN, AKAP8L, PPIE, STK19, FIBP, C60RF226, H2AFX, EGFL8, PSMD13, CACTIN, EXOSC7, C120RF57, THAP4, TMEM259, THOC6, AP5Z1, PQBP1, RBM10, C10RF35, C19ORF24, SART1, CDC34, FASTK, POMP, PRPF6, PRPF19, BRK1, UFC1, SNRPA1, ZCCHC17, SNRPB2, PCP2, SSH3, SETD1A, WDR90, THEM6, U2AF2, RBM14, MAST3, LIMK1, SF3B4, DDX39B, RTEL1, ZNF165, MAPK12, PSMD8, CDK5RAP1, PDZK1IP1, SETD4, CHTOP, CDK11A, SRSF4, TBX19, RTN2, CCDC32, CYSRT1, IQCK, MPP1, MAMSTR, ILRUN, DBNDD1, EPHB6, TCF15, C60RF52, CYGB, CCDC85C, PHYHD1, ITPKC, CDC25C, RMI2, SNRNP40, HISTIHIE, ZC3H18, SON, RBM27, TCF12, BCLAF1, ERBIN, SETD2, TCP11L2, EPC2, TRIP12, YLPM1, LMTK2, GPATCH8, DDX46, PRPF4B, TAB3, EPG5, RSBN1L, SF3B1, PUS7L, KCTD20, RBM26, BAZ2A, RBM41, RREB1, ZNF621, FAM160B1, CDK13, SDE2, DHX15, PRPF40A, CHIC1, SREK1, LIN52, BARD1, ZNF441, GNAQ, THRAP3, HBP1, SMC5, PPP4R3B, RBBP6, TTC26, COG6, ZC3H14, UBE3B, MRTFB, YTHDF3, UBE4A, CBLL1, API5, CMTR2, TBC1D12, WRN, KIAA1328, TMEM209, ZCCHC4, MAPK14, ZNF160, SLU7, ERCC8, FOXJ3, PCLO, RSRC1, ZC3H11A, BMP2K, RALGAPB, FBXL4, RTL6, RCAN3, FBXO34, ZBTB8A, CWF19L2, SRRM2, HELQ, FYTTD1, PPIG, ANKRD44, SOCS6, S100PBP, ZNF304, ZNF543, RBM25, EFCAB13, CPD, ARMCX5, POLI, ZNF551, MAML3, POLR3B, SFMBT2, DDX17, RNF169, KAT6A, DDX42, GPATCH2, CBFA2T2, E2F3, ZNF169, TAF5L, KIAA0100, PRKAA1, LHX4, RSRC2, CSRNP2, NCBP3, NCAPG2, SF3A1, DENND1B, BRD2, PNISR, E2F7, LRRC8B, PACSIN2, PNN, KIAA0556, SAP130, CPSF6, MAP3K7, TADA2A, HP1BP3, ZNF217, BRD1, SRRM1, SRSF11, GLYR1, FAM227B, AAGAB, PLRG1, FCHSD2, MECOM, TMEM56, CDYL, ELOA, STK17A, RIOK1, ARHGAP42, R3HCC1L, COPS4, BORCS7, THOC1, CIR1, PYROXD1, ARHGAP18, NSL1, WTAP, ZNHIT6, BCAS2, HAUS6, MORF4L1, SMC4, MBD4, PRPF18, CWC22, UBAP2L, SMURF2, KDM6B, PRKAA2, LIFR, RBM8A, SNURF, DAZAP2, FAM120C, WDR17, ZDHHC15, GTF2H2C, SRGAP1, ZSWIM5, RAF1, ZNF286B, ZNF528, ZNF572, ZNF527, XYLB, FNBP4, PRPF4, SIPA1L3, ZNF382, RFXAP, RBM39, CWC25, ZIM2, ANXA9, MFSD11, BPNT1, GPN3, MAPT, PPP1R16B, ZNF250, RAD52, ZNF786, GNB5, MNS1, TARBP1, RBM6, PRKN, ZCWPW2, MAMDC2, IPCEF1, NFATC4, LPAR1, VXN, FAM107A, IL16, USP22, RNF112, CRY2, PLAGI, IQUB, PPP1R8, BNIP3L or any combination thereof.

39. The method of claim 36, wherein the genes comprising speckle Signature II are selected from the group consisting of SON, RBM27, TCF12, BCLAF1, ERBIN, SETD2, TCP11L2, EPC2, TRIP12, YLPM1, LMTK2, GPATCH8, DDX46, PRPF4B, TAB3, EPG5, RSBN1L, SF3B1, PUS7L, KCTD20, RBM26, BAZ2A, RBM41, RREB1, ZNF621, FAM160B1, CDK13, SDE2, DHX15, PRPF40A, CHIC1, SREK1, LIN52, BARD1, ZNF441, GNAQ, THRAP3, HBP1, SMC5, PPP4R3B, RBBP6, TTC26, COG6, ZC3H14, UBE3B, MRTFB, YTHDF3, UBE4A, CBLL1, API5, CMTR2, TBC1D12, WRN, KIAA1328, TMEM209, ZCCHC4, MAPK14, ZNF160, SLU7, ERCC8, FOXJ3, PCLO, RSRC1, ZC3H11A, BMP2K, RALGAPB, FBXL4, RTL6, RCAN3, FBXO34, ZBTB8A, CWF19L2, SRRM2, HELQ, FYTTD1, PPIG, ANKRD44, SOCS6, S100PBP, ZNF304, ZNF543, RBM25, EFCAB13, CPD, ARMCX5, POLI, ZNF551, MAML3, POLR3B, SFMBT2, DDX17, RNF169, KAT6A, DDX42, GPATCH2, CBFA2T2, E2F3, ZNF169, TAF5L, KIAA0100, PRKAA1, LHX4, RSRC2, CSRNP2, NCBP3, NCAPG2, SF3A1, DENND1B, BRD2, PNISR, E2F7, LRRC8B, PACSIN2, PNN, KIAA0556, SAP130, CPSF6, MAP3K7, TADA2A, HP1BP3, ZNF217, BRD1, SRRM1, SRSF11, GLYR1, FAM227B, AAGAB, PLRG1, FCHSD2, MECOM, TMEM56, CDYL, ELOA, STK17A, RIOK1, ARHGAP42, R3HCC1L, COPS4, BORCS7, THOC1, CIR1, PYROXD1, ARHGAP18, NSL1, WTAP, ZNHIT6, BCAS2, HAUS6, MORF4L1, SMC4, MBD4, PRPF18, CWC22, UBAP2L, SMURF2, KDM6B, PRKAA2, LIFR, RBM8A, SNURF, DAZAP2, FAM120C, WDR17, ZDHHC15, GTF2H2C, SRGAP1, ZSWIM5, RAF1, ZNF286B, ZNF528, ZNF572, ZNF527, XYLB, FNBP4, PRPF4, SIPA1L3, ZNF382, RFXAP, RBM39, CWC25, ZIM2, ANXA9, MFSD11, BPNT1, GPN3, MAPT, PPP1R16B, ZNF250, RAD52, ZNF786, GNB5, MNS1, TARBP1, RBM6, PRKN, ZCWPW2, MAMDC2, IPCEF1, NFATC4, LPAR1, VXN, FAM107A, IL16, USP22, RNF112, CRY2, PLAGI, IQUB, PPP1R8, BNIP3L, VAX2, JDP2, PLEKHN1, HDAC5, C11ORF49, SLC4A2, STYXL1, TMEM179B, TAB1, ZNF446, TBXA2R, UNC45A, PCBP1, PHLDB3, KTI12, AKAP17A, PRCC, ZNF821, SPINDOC, HSF4, DEXI, HEXIM2, EHMT2, VPS72, DDX39A, KIF22, DPCD, LHPP, CD2BP2, CDK11B, GTF2H4, DGKZ, SARNP, ALYREF, SLC2A4RG, TEPSIN, AKAP8L, PPIE, STK19, FIBP, C60RF226, H2AFX, EGFL8, PSMD13, CACTIN, EXOSC7, C120RF57, THAP4, TMEM259, THOC6, AP5Z1, PQBP1, RBM10, C1ORF35, C19ORF24, SART1, CDC34, FASTK, POMP, PRPF6, PRPF19, BRK1, UFC1, SNRPA1, ZCCHC17, SNRPB2, PCP2, SSH3, SETD1A, WDR90, THEM6, U2AF2, RBM14, MAST3, LIMK1, SF3B4, DDX39B, RTEL1, ZNF165, MAPK12, PSMD8, CDK5RAP1, PDZK1IP1, SETD4, CHTOP, CDK11A, SRSF4, TBX19, RTN2, CCDC32, CYSRT1, IQCK, MPP1, MAMSTR, ILRUN, DBNDD1, EPHB6, TCF15, C60RF52, CYGB, CCDC85C, PHYHD1, ITPKC, CDC25C, RMI2, SNRNP40, HISTIHIE, ZC3H18.

40. A method of treating a speckle signature associated cancer in a subject in need thereof, comprising:
a. obtaining a specimen of tumor tissue;
b. isolating and purifying RNA from the specimen;
c. performing RNA-seq using the RNA to determine the speckle signature of the tumor tissue; and
d. administering an effective amount of an inhibitor of expression for at least one speckle signature gene, thereby treating the cancer.

41. The method of claim 40, further comprising determining the nuclear localization profile of at least one speckle signature gene.

42. The method of claim 41, wherein a radial nuclear localization profile correlates with worse prognosis.

43. The method of claim 40, wherein the at least one inhibited speckle protein gene is associated with speckle signature I.

44. The method of claim 43, wherein the inhibition of at least one gene associated with speckle Signature I shifts the speckle signature of the tumor tissue to speckle Signature II.

45. The method of claim 40, wherein the at least one inhibited speckle protein gene is associated with speckle Signature II.

46. The method of claim 45, wherein the inhibition of at least one gene associated with speckle Signature II shifts the speckle signature of the tumor tissue to speckle Signature I.

47. The method of claim 40, wherein inhibiting the expression of the speckle signature gene shifts the speckle signature of the tumor tissue and improves prognosis.

48. The method of claim 40, wherein the cancer is selected from the group consisting of clear cell renal cell carcinoma, KMT2D wild type melanoma, TTN wild type lung adenocarcinoma, BRAF wild type thyroid cancer, and PIK3R1 mutant endometrial cancer.

49. The method of claim 40, wherein the inhibitor of speckle signature gene expression is selected from the group consisting of an inhibitory RNA, a small molecule, a PROTAC, a CRISPR/Cas9 system, and any combination thereof.

50. The method of claim 47, wherein the inhibitory RNA is selected from the group consisting of an siRNA, and an shRNA or any combination thereof.

51. The method of claim 40, wherein the speckle signature gene is SART1.

52. The method of claim 40, wherein the speckle signature gene is HBP1.

53. The method of claim 40, wherein the speckle signature gene is COPS4.

54. The method of claim 40, wherein the speckle signature is determined by immunofluorescence of FFPE tumor samples.

55. The method of claim 40, wherein the speckle signature is determined by RNA or protein analysis of a subset of speckle protein genes comprising FIBP, PQBP1, SART1, THRAP4, FASTK, C19ORF24, CDC34, FBXL4, WRN, RNF169, TRIP12, SON, RBM27, BCLAF1, PRPF4B, SETD2, RBM26, EPC2, or any combination thereof.

56. A method of determining the prognosis of a speckle-related cancer in a subject in need thereof, comprising:
a. obtaining a specimen of cancer tissue;
b. preparing the tissue specimen such that nuclear localization of at least one speckle-related protein can be visualized and quantified; and
c. determining the nuclear localization profile of at least one speckle-related protein in the tissue, thereby indicating the severity of the speckle-related cancer;
wherein radial positioning speckle-related protein expression indicates a worse prognosis.

57. The method of claim 56, wherein the at least one speckle-related protein is selected from the group consisting of FIBP, PQBP1, SART1, THRAP4, FASTK, C19ORF24, CDC34, FBXL4, WRN, RNF169, TRIP12, SON, RBM27, BCLAF1, PRPF4B, SETD2, RBM26, EPC2, or any combination thereof.

58. The method of claim 56, wherein the at least one speckle-related protein is SON.

59. The method of claim 56, wherein the visualization and quantification of the speckle protein localization comprises immunofluorescence microscopy.

60. The method of claim 56, wherein the cancer is selected from the group consisting of clear cell renal cell carcinoma, KMT2D wild type melanoma, TTN wild type lung adenocarcinoma, BRAF wild type thyroid cancer, and PIK3R1 mutant endometrial cancer.

61. A method of treating a speckle-related cancer in a subject in need thereof, comprising:
a. performing RNA-seq using RNA purified from a tumor specimen from the subject to determine the speckle signature of the tumor tissue; and
b. administering an effective amount of an anticancer therapeutic, thereby treating the cancer;
wherein, the sensitivity of the tumor to the anticancer therapeutic correlates with the speckle signature of the tumor tissue.

62. The method of claim 61, further comprising determining the nuclear localization profile of nuclear speckles.

63. The method of claim 61, wherein the speckle signature is associated with speckle signature I.

64. The method of claim 61, wherein the speckle signature is associated with speckle Signature II.

65. The method of claim 61, wherein choosing a speckle signature correlated treatment strategy improves treatment prognosis.

66. The method of claim 61, wherein the cancer is selected from the group consisting of clear cell renal cell carcinoma, neuroblastoma, KMT2D wild type melanoma, TTN wild type lung adenocarcinoma, BRAF wild type thyroid cancer, and PIK3R1 mutant endometrial cancer.

67. The method of claim 61, wherein the cancer is clear cell renal cell carcinoma.

68. The method of claim 61, wherein the anticancer therapeutic is selected from the group consisting of an a biologic, a small molecule, an immunotherapy, and any combination thereof.

69. The method of claim 67, wherein the immunotherapy is an immune checkpoint inhibitor.

70. The method of claim 68, wherein the immune checkpoint inhibitor is an inhibitor of PD-1.

71. The method of claim 69, wherein the PD-1 inhibitor is nivolumab.

72. The method of claim 61, wherein the anticancer therapeutic is an inhibitor of HIF-2a.

73. The method of claim 72, wherein the inhibitor of HIF-2a is PT2399.

74. The method of claim 61, wherein the speckle signature is determined by the nuclear localization profile of nuclear speckles.

75. The method of claim 74, wherein the nuclear localization profile is determined by immunofluorescence of FFPE tumor samples.

76. The method of claim 61, wherein the speckle signature is determined by RNA or protein analysis of a subset of speckle protein genes comprising FIBP, PQBP1, SART1, THRAP4, FASTK, C19ORF24, CDC34, FBXL4, WRN, RNF169, TRIP12, SON, RBM27, BCLAF1, PRPF4B, SETD2, RBM26, EPC2, or any combination thereof.

The application's sequence listing, which the Patent Office published only in electronic form, follows.

SEQUENCE LISTING (1752 sequences)

SEQ ID NO: 1 - protein, 62 aa, synthetic construct
IPVITSTEASSSPTTAEGTSIPTSTYTEGSTPLTSTPASTMPVATSEMSTLSITPVDTSTLV

SEQ ID NO: 2 - protein, 62 aa, synthetic construct
STEASSSPTTAEGTSIPTSTYTEGSTPLTSTPASTMPVATSEMSTLSITPVDTSTLVTTSTE

SEQ ID NO: 3 - protein, 62 aa, synthetic construct
TPVTNSTEARSSPTTSEGTSMPTSTPGEGSTPLTSMPDSTTPVVSSEARTLSATPVDTSTPV

SEQ ID NO: 4 - protein, 62 aa, synthetic construct
TQVATSTEASSPPPTAEVTSMPTSTPGERSTPLTSMPVRHTPVASSEASTLSTSPVDTSTPV

SEQ ID NO: 5 - protein, 62 aa, synthetic construct
TPVTTSTEACSSPTTSEGTSMPNSNPSEGTTPLTSIPVSTTPVVSSEASTLSATPVDTSTPG

SEQ ID NO: 6 - protein, 62 aa, synthetic construct
TPGTTSAEATSSPTTAEGISIPTSTPSEGKTPLKSIPVSNTPVANSEASTLSTTPVDSNSPV

SEQ ID NO: 7 - protein, 62 aa, synthetic construct
TPVTTSTEARSSPTTSEGTSMPNSTPSEGTTPLTSIPVSTTPVLSSEASTLSATPIDTSTPV

SEQ ID NO: 8 - protein, 62 aa, synthetic construct
TPVTNSTEARSSPTTSEGTSMPTSTPSEGSTPFTSMPVSTMPVVTSEASTLSATPVDTSTPV

SEQ ID NO: 9 - protein, 62 aa, synthetic construct
TPVTTYSQAGSSPTTADDTSMPTSTYSEGSTPLTSVPVSTMPVVSSEASTHSTTPVDTSTPV

SEQ ID NO: 10 - protein, 62 aa, synthetic construct
TPVTTSTEASSSPTTAEGTSIPTSPPSEGTTPLASMPVSTTPVVSSEAGTLSTTPVDTSTPM

SEQ ID NO: 11 - protein, 62 aa, synthetic construct
SPVVTSTEISSSATSAEGTSMPTSTYSEGSTPLRSMPVSTKPLASSEASTLSTTPVDTSIPV

SEQ ID NO: 12 - protein, 62 aa, synthetic construct
IPVTTSTEASSSPTTAEVTSMPTSTPSETSTPLTSMPVNHTPVASSEAGTLSTTPVDTSTPV

SEQ ID NO: 13 - protein, 62 aa, synthetic construct
TPVTTSTEASSSPTTAEGTGIPISTPSEGSTPLTSIPVSTTPVAIPEASTLSTTPVDSNSPV

SEQ ID NO: 14 - protein, 62 aa, synthetic construct
SPVVTSTEVSSSPTPAEGTSMPISTYSEGSTPLTGVPVSTTPVTSSAISTLSTTPVDTSTPV

SEQ ID NO: 15 - protein, 62 aa, synthetic construct
STPVTTSTEATSSTTAEGTSIPTSTPSEGMTPLTSVPVSNTPVASSEASILSTTPVDSNTPL

SEQ ID NO: 16 - protein, 62 aa, synthetic construct
TPVTTSTEASLSPTTAEGTSIPTSSPSEGTTPLASMPVSTTPVVSSEVNTLSTTPVDSNTLV

SEQ ID NO: 17 - protein, 62 aa, synthetic construct
TLVTTSTEASSSPTIAEGTSLPTSTTSEGSTPLSIMPLSTTPVASSEASTLSTTPVDTSTPV

SEQ ID NO: 18 - protein, 62 aa, synthetic construct
TPVTTSSPTNSSPTTAEVTSMPTSTAGEGSTPLTNMPVSTTPVASSEASTLSTTPVDSNTFV

SEQ ID NO: 19 - protein, 62 aa, synthetic construct
HRLALRLAGLAGLGGMPRASPGGRSPQVPTSPVPGDPFDQEDETPDPKFAVVFPRIHRAGRA

SEQ ID NO: 20 - protein, 62 aa, synthetic construct
AFLRKIDPKDEALAKLGINGAHSSPPMLSPSPGKGPPPAVAPRPKAPLQLGPSSSIKEKQGP

SEQ ID NO: 21 - protein, 62 aa, synthetic construct
RPCSPASAPAPTSPKKPKIQAPGETFPTDWSPPPVEFLNPRVLQASREAPAQRWVGVVGPQG

SEQ ID NO: 22 - protein, 62 aa, synthetic construct
HSSPEDPVLPRPPQTLPLDVGQGPSEPGTHSPGLLSPTFRPGAPSGQTVPPPLPKPPRSPSR

SEQ ID NO: 23 - protein, 62 aa, synthetic construct
DPVLPRPPQTLPLDVGQGPSEPGTHSPGLLSPTFRPGAPSGQTVPPPLPKPPRSPSRSPSHS

SEQ ID NO: 24 - protein, 62 aa, synthetic construct
VAEILEAVTYTQASPKEAKVEPINTPPTPSSPFEDMELSGEPVPEGTLETTNMSIIQHSSPK

SEQ ID NO: 25 - protein, 62 aa, synthetic construct
PTAAARISELSGLSCSAPSQVHISTTGLIVTPPPSSPVTTGPSFTFPSDVPYQAALGTLNPP

SEQ ID NO: 26 - protein, 62 aa, synthetic construct
DENPSCGTGSERLAFQSRSGSPDPEVPSRASPPVWHAVRMRASSPSPPGRFFLPIPQQWDES

SEQ ID NO: 27 - protein, 62 aa, synthetic construct
EFKIKLLEKDPYGLDVPNTAFGRQHSPYGPSPLGWPSSETRASLYPPTLLEGPLRLSPLLPR

SEQ ID NO: 28 - protein, 62 aa, synthetic construct
PTHAQSSKPQVAAQSQPQSNVQGQSPVRVQSPSQTRIRPSTPSQLSPGQQSQVQTTTSQPIP

SEQ ID NO: 29 - protein, 62 aa, synthetic construct
QPQSNVQGQSPVRVQSPSQTRIRPSTPSQLSPGQQSQVQTTTSQPIPIQPHTSLQIPSQGQP

SEQ ID NO: 30 - protein, 62 aa, synthetic construct
KMNNRDLKPQPDIVLLPLPTAYELDSTKLKSPLITSPMFRNVPTANPTEPGIRRVPGASEVI

SEQ ID NO: 31 - protein, 62 aa, synthetic construct
PHFALLAAQTMQQIRHPRLPMAQFGGTFSPSPNTWGPFPVRPVNPGNTNSSPKHNNTSRLPN

SEQ ID NO: 32 - protein, 62 aa, synthetic construct
LCLIPRNTGTPQRVLRPVVWSPPSRKKPVLSPHNSIMFGHLSPVRIPCLRGKFNLQLPSLDD

SEQ ID NO: 33 - protein, 62 aa, synthetic construct
KNVLDKTRVTKDFLQDNLFSGPGPKEPTGLSPFLLLPPRPPPARPDKLPELPAQKRQLPVFA

SEQ ID NO: 34 - protein, 62 aa, synthetic construct
KPGSLSHQNPDILPTNSRTQVPPVKPGIPASPKADTVKCVTPLHSKPGAPSHPQLGALTSQA

SEQ ID NO: 35 - protein, 62 aa, synthetic construct
LSKTPKILLSLKPSAPPHQISTSISLSKPETPNPHMPQTPLPPRPDRPRPPLPESLSTFPNT

SEQ ID NO: 36 - protein, 62 aa, synthetic construct
GSINEEQPARDGGPRLPRPPAPGREYCNRGSPWPPEAEWTLPDHDRGPLLGPSSLQQSPIHG

SEQ ID NO: 37 - protein, 62 aa, synthetic construct
CTDSWRVVDCPESCCEPCCCAPAPSLTLVCTPVSCVSSPCCQTACEPSACQSGYTSSCTTPC

SEQ ID NO: 38 - protein, 62 aa, synthetic construct
LGDPASTTDGAQEARVPLDGAFWIPRPPAGSPKGCFACVSKPPALQAPAAPAPEPSASPPMA

SEQ ID NO: 39 - protein, 62 aa, synthetic construct
GLCPPPAILPTSMCQPPGIMQFEEPPLGAQTPRATQPPDLRPVETFLTGEPKVLGTVQILIG

SEQ ID NO: 40 - protein, 62 aa, synthetic construct
PQKTHLQPSFGAAHELPLTPPADPSYPYEFSPVKMLPSSMAALPASCAPAYVPYAAQAALPP

SEQ ID NO: 41 - protein, 62 aa, synthetic construct
AARPPYPGAVYAGYAPPSLAAPPPVYYPAASPGPCRVFGLVPERPLSPELGPAPSGPGGSCA

SEQ ID NO: 42 - protein, 62 aa, synthetic construct
EYAWVPPGLKPEQVHQYYSCLPEEKVPYVNSPGEKLRIKQLLHQLPPHDNEVRYCNSLDEEE

SEQ ID NO: 43 - protein, 62 aa, synthetic construct
LCTRDDLRTLCSRLPHNNLLQLVISGPVQQSPHAALPPGFYPHIHTPPLGYGAVPAHPAAHP

SEQ ID NO: 44 - protein, 62 aa, synthetic construct
HNNLLQLVISGPVQQSPHAALPPGFYPHIHTPPLGYGAVPAHPAAHPALPTHPGHTFISGVT

SEQ ID NO: 45 - protein, 62 aa, synthetic construct
EKRRQARGEDQCLGGAQATAAEKEKLPSSSSPACQSPPQSFPNAGIPQESQRASYPSSPASA

SEQ ID NO: 46 - protein, 62 aa, synthetic construct
ARGEDQCLGGAQATAAEKEKLPSSSSPACQSPPQSFPNAGIPQESQRASYPSSPASAVSLTS

SEQ ID NO: 47 - protein, 62 aa, synthetic construct
ARLPLKLPTLHPKAPLSPPPAPKSAPSKVPSPVPEAPFQSEMYPVPPITRALLYEGISHDFQ

SEQ ID NO: 48 - protein, 62 aa, synthetic construct
ATDGGQPPRSSTAKVTINVMDVNDNSPVVISPPSNTSFKLVPLSAIPGSVVAEVFAVDVDTG

SEQ ID NO: 49 - protein, 62 aa, synthetic construct
YLQDSLPSGPSQDDSLQAFSSPSPSPDSCPSPEEPPSTAGIPQPPSPELQHRRRLPGAQGPE

SEQ ID NO: 50 - protein, 62 aa, synthetic construct
SAEDLQENHISESFLKPSTSETPLEPHTSESPLVPSPSQIPLEAHSPETHQEPSISETPSET

SEQ ID NO: 51 - protein, 62 aa, synthetic construct
QQLQQQLQQRLQLQQLQHMQHQSQPSPRQHSPVASQITSPIPAIGSPQPASQQHQSQIQSQT

SEQ ID NO: 52 - protein, 62 aa, synthetic construct
EQISDPDPWISASDPPLAPALPSGTAPFLFSPGVLLPEPEYCPPWRSPKKESPKISQRWRES

SEQ ID NO: 53 - protein, 62 aa, synthetic construct
CAQAGQAPAWRNRTFCPMRCPPGSSYSPCSSPCPDTCSSINNPRDCPKALPCAESCECQKGH

SEQ ID NO: 54 - protein, 62 aa, synthetic construct
RPQTKQADIVRGESVKPSLPSPSKPPIQQPTPGKPPAQQPGHEKSQPGPAKPPAQPSGLTKP

SEQ ID NO: 55 - protein, 62 aa, synthetic construct
KTPAQQPGPAKPPTQQVGTPKPLAQQPGLQSPAKAPGPTKTPVQQPGPGKIPAQQAGPGKTS

SEQ ID NO: 56 - protein, 62 aa, synthetic construct
KPPTQQVGTPKPLAQQPGLQSPAKAPGPTKTPVQQPGPGKIPAQQAGPGKTSAQQTGPTKPP

SEQ ID NO: 57 - protein, 62 aa, synthetic construct
IMDIMKRGDALPLQCSPTSSQRVLPSKQIASPIYLPPILAARPHLRPANMCQANGAYSREQF

SEQ ID NO: 58 - protein, 62 aa, synthetic construct
RNSRGQDHGLERVPFPPQLQSETYLHPADPSPAWDDPGSTGSPNLRLLTEEIAFQPLAEEAS

SEQ ID NO: 59 - protein, 62 aa, synthetic construct
RNLLCEQPTVPRENGKPEAAGPEPSSSGEETPDAALTCLKERREQLPPQEDSKVTKQDKNLI

SEQ ID NO: 60 - protein, 62 aa, synthetic construct
PLQKNTPLPQSPAIPVSGPVRLVVLGPTSGSPKTVATMLLTPLAPAPTPERSQPEVPAQQAQ

SEQ ID NO: 61 - protein, 62 aa, synthetic construct
SPAIPVSGPVRLVVLGPTSGSPKTVATMLLTPLAPAPTPERSQPEVPAQQAQTGLGPVLGAL

SEQ ID NO: 62 - protein, 62 aa, synthetic construct
VPPSRFFSAAAAPAAPPIAAEPAAAAPLTATPVAAEPAAGAPVAAEPAAEAPVGAEPAAEAP

SEQ ID NO: 63 - protein, 62 aa, synthetic construct
VLEPDISAASTPLASKLLGPFPTSWDRSISSPQPGQRTHATPQAPNPSLSEGEIPVLLLDDY

SEQ ID NO: 64 - protein, 62 aa, synthetic construct
QRLKSTMGSSFSYPDVKLKGIPVYPYPRATSPAPDADSCCKEPLADPPPMRHSLPSTFASSP

SEQ ID NO: 65 - protein, 62 aa, synthetic construct
INGVKENDSEDQDVAMKSFAALEAAAPIQPTPVAQKETLMYPRGLLPLPSKKPCMQSPPSPL

SEQ ID NO: 66 - protein, 62 aa, synthetic construct
PGGGWPWVSREVPGTRSFGPAPDSTRPWLESPPQGRPLSSQGPGATGAYDAGEAGADSSRDN

SEQ ID NO: 67 - protein, 62 aa, synthetic construct
EGSLPLDPGETPPPDALEPGTPPCGDPSRSTPPGRPGNPSEPDPEDAEGRLAEARASTSSPK

SEQ ID NO: 68 - protein, 62 aa, synthetic construct
TAHSELPQQDSLLVSLPSATPQAQVEAEGPTPGKSAPPRGSPPRGAQPGAGAGPQEPTQTPP

SEQ ID NO: 69 - protein, 62 aa, synthetic construct
SLLVSLPSATPQAQVEAEGPTPGKSAPPRGSPPRGAQPGAGAGPQEPTQTPPTMAEQEAQPR

SEQ ID NO: 70 - protein, 62 aa, synthetic construct
SGTVEIQALGMQPYPPLEVPNQCVEPPVYPTPTVYSPGKQGFKPKGPNPAAPMTSATGGTVA

SEQ ID NO: 71 - protein, 62 aa, synthetic construct
IQALGMQPYPPLEVPNQCVEPPVYPTPTVYSPGKQGFKPKGPNPAAPMTSATGGTVATFDSP

SEQ ID NO: 72 - protein, 62 aa, synthetic construct
KEPPVLPSSTCSSKPGPVEPASSQPEEAAPTPVPRLSESANPPAQRPDPAHPGGPKPQKTEE

SEQ ID NO: 73 - protein, 62 aa, synthetic construct
KTLLQTYPVVSVTLPQTYPASTMTTTPPKTSPVPKVTIIKTPAQMYPGPTVTKTAPHTCPMP

SEQ ID NO: 74 - protein, 62 aa, synthetic construct
SVTLPQTYPASTMTTTPPKTSPVPKVTIIKTPAQMYPGPTVTKTAPHTCPMPTMTKIQVHPT

SEQ ID NO: 75 - protein, 62 aa, synthetic construct
SPVGSSGLITQEGVHIPFDVHHVESLAEQGTPLCSNPAGNGPEALETVVCVPVPVQVGAGPS

SEQ ID NO: 76 - protein, 62 aa, synthetic construct
QVDDCPESCCEPPCSAPSCCAPAPSLSLVCTPVSCVSSPCCQAACEPSACQSGCTSSCTPSC

SEQ ID NO: 77 - protein, 62 aa, synthetic construct
TNSLPNGPALADGPAPVSPLEPSPEKVATISPRRHAMPGSRPRSRIPVLLSEEDTGSEPSGS

SEQ ID NO: 78 - protein, 62 aa, synthetic construct
GRDPEDEEEEEEEKEMPSPATPSSHCERPESPCAGLLGGDGPLVEPLDMPDITLLQLEGEAS

SEQ ID NO: 79 - protein, 62 aa, synthetic construct
QSLGTYLQGTASALSQSQEPPPSVNRVPPSSPSSQEPGSGQPLPEESVAIKGRSSCPAFLRY

SEQ ID NO: 80 - protein, 62 aa, synthetic construct
SSTGHSTNLPDLVSGLGDSANRVPFAPLSFSPTAAIPGIPEPPWLPSPAYPRSLRPDGMNPA

SEQ ID NO: 81 - protein, 62 aa, synthetic construct
STPAAASPVGAEKLLAPRPGGPLPSRLEGGSPARGSAFTSVPQLGSAGSTSGGGGTGAGAAG

SEQ ID NO: 82 - protein, 62 aa, synthetic construct
GTPSSAPADLPAPFSPPLTALPTAPPGLLGTPYAISLSNFIGLKPMPFLALPPASPGPPPGL

SEQ ID NO: 83 - protein, 62 aa, synthetic construct
KSSQTLAVPVGLPSVPPLDSLGHTNPLAASSPAWRPPPGQARPPGSPGQSAQLPLDLLPSLP

SEQ ID NO: 84 - protein, 62 aa, synthetic construct
PPLDSLGHTNPLAASSPAWRPPPGQARPPGSPGQSAQLPLDLLPSLPRESQIFVISRHGMPL

SEQ ID NO: 85 - protein, 62 aa, synthetic construct
ARYIVLVPVEGGEQSLPPEGNWTLVETLIETPLGIRPLTKIPPYHGPYYQTLAEIKKQIRQR

SEQ ID NO: 86 - protein, 62 aa, synthetic construct
RPGSRGPAPGPPPAGSALGGAPPVPSRPGASPDPFGPPPQVPSRPNRAPPGVPSRSGQASPS

SEQ ID NO: 87 - protein, 62 aa, synthetic construct
EACGDSPHAHESAGQPPPSSLRSLVPPEARSPGSLLPHRDLLRRIVSSIVHQKTPSPGPAPA

SEQ ID NO: 88 - protein, 62 aa, synthetic construct
PAPAALGKVFNNSASQSSTHKQTSPVPSPLSPRLPSPQQHHRILRLPALPGEREAALNDSPC

SEQ ID NO: 89 - protein, 62 aa, synthetic construct
LGKVFNNSASQSSTHKQTSPVPSPLSPRLPSPQQHHRILRLPALPGEREAALNDSPCRKSRV

SEQ ID NO: 90 - protein, 62 aa, synthetic construct
LFARKSVASSACSTPPPGPGPGPCPGPASASPASPSPADVAYEEGLARLKIRALEKLEVDRR

SEQ ID NO: 91 - protein, 62 aa, synthetic construct
TKASLSAKGTHMRKVPPQGGQDCSASTVSASPEAPTPSPLDPNSDKAKACLSKGRRTLRKPK

SEQ ID NO: 92 - protein, 62 aa, synthetic construct
VSRPRALLHGLRGHRALSLCPSPAQSPRSASPPGPAPQHPAAPASPPRPSTAGAIPPLRSHK

SEQ ID NO: 93 - protein, 62 aa, synthetic construct
PFHHGQYYGYLSSSSPGEVEPPPFYVPEVGSPLSSVMSSPPLPTEGPFGHPTIPEENGENAS

SEQ ID NO: 94 - protein, 62 aa, synthetic construct
NSTLPLTQTPTGGRSPEPWGRPEFPFGGLETPAMMFPHQLPPCDVPESLQPKAGLPRGLPPT

SEQ ID NO: 95 - protein, 62 aa, synthetic construct
GCGMVVGTASTMVTARPEQSQILIQHPDAPSPAQPQVSPAQPTPSTGGRRRRTVDEDPDERR

SEQ ID NO: 96 - protein, 62 aa, synthetic construct; identical to SEQ ID NO: 58

SEQ ID NO: 97 - protein, 62 aa, synthetic construct
PPSVDDNLKECLFVPLPPSPLPPSVDDNLKTPPLATQEAEVEKPPKPKRWRVDEVEQSPKPK

SEQ ID NO: 98 - protein, 62 aa, synthetic construct
HSDVPSSAHAGFFVEDNFMVGPQLPMPFFPTPRYQRPAPVVHRGFGRYRPRGPYTPWGQRPR

SEQ ID NO: 99 - protein, 62 aa, synthetic construct; identical to SEQ ID NO: 97

SEQ ID NO: 100 - protein, 62 aa, synthetic construct
DLLLSEAQGPFSHREEKEEEEEDSGLSPGPSPGSGVPLPTWPTHTLPDRPQAQQLQSCQGRP

SEQ ID NO: 101 - protein, 62 aa, synthetic construct
HNLNEIFQYVSTTTKVPPPDMTSFPYGTRRSPAKIWPTTKRPAITPANNPKHSKDPHKTGPE

SEQ ID NO: 102 - protein, 62 aa, synthetic construct
VALPLALLGLYPALCSPRVPPRCWAKLFRLSPGHAAPLLPGGWVTGPPDKEPLGSAIARGDA

SEQ ID NO: 103 - protein, 62 aa, synthetic construct
PALPFLPPTSDPPDHPPREPPPQPIMPSVFSPDNPLMLSAFPSSLLVTGDGGPCLSGAGAGK

SEQ ID NO: 104 - protein, 62 aa, synthetic construct
VSENGGLRFPRNTERPPETGPWRAPGPWEKTPESWGPAPTIGEPAPETSLERAPAPSAVVSS

SEQ ID NO: 105 - protein, 62 aa, synthetic construct
PTNELSVQAPPEGDTDPSTPPAPPTPPHPATPGDGFPSNDSGFGGSFEWAEDFPLLPPPGPP

SEQ ID NO: 106 - protein, 62 aa, synthetic construct
SSLNGGGGHGGKGAPGPGGALPTCPACHKITPRTEAPVSSVSNSLENALHTSAHSTEESLPK

SEQ ID NO: 107 - protein, 62 aa, synthetic construct
ELKFELLEKDPYALDVPNTAFGREHSPYGPSPLGWPSSETRAFLSPPTLLEGPLRLSPLLPG

SEQ ID NO: 108 - protein, 62 aa, synthetic construct
AAAAAALYYSSSTLPAPPRGGSPLAAPQGGSPTKLQRGGSAPEGATYAAPRGSSPKQSPSRL

SEQ ID NO: 109 - protein, 62 aa, synthetic construct
SRTPNRISTRLTTITRAPTRFPGHRVPIRASPRSTTARNTAAPATVPSTTAPFFSSSTLGSR

SEQ ID NO: 110 - protein, 62 aa, synthetic construct
KTLPGTRLALLASSEPPGDCLTTAGDKLQPSPPPLSPPPRAPPLSPGPGGCFEGGAGNCSSR

SEQ ID NO: 111 - protein, 62 aa, synthetic construct
DAGSYWCKIQTVWVLDSWSRDPSDLVRVYVSPAITTPRRTTHPATPPIFLVVNPGRNLSTGE

SEQ ID NO: 112 - protein, 62 aa, synthetic construct
WCKIQTVWVLDSWSRDPSDLVRVYVSPAITTPRRTTHPATPPIFLVVNPGRNLSTGEVLTQN

SEQ ID NO: 113 - protein, 62 aa, synthetic construct
SVPFELQWMLIHCDPLRPRRETCHELPARITPSQTTDERGPPGEQGPPGPPGPPGVPGIDGI

SEQ ID NO: 114 - protein, 62 aa, synthetic construct
TIFITHLLHVATTQPPPLPRWLHSLLLHCNSPGRCCPTAPQKENKGPGLTPTHLPGVKEPEV

SEQ ID NO: 115 - protein, 62 aa, synthetic construct
PPSVDDNLKDCLFVPLPPSPLPPSVDDNLKTPPLATQEAEAEKPPKPKRWRVDEVEQSPKPK

SEQ ID NO: 116 - protein, 62 aa, synthetic construct
HLVRSSVPVPTSAPAPPGTLAPATTPVLAPTPAPVPASAPSPAPALVMALTTTPVPDPVPAT

SEQ ID NO: 117 - protein, 62 aa, synthetic construct
QVDDCPESCCEPPCCAPSCCAPAPCLSLVCTPVSRVSSPCCPVTCEPSPCQSGCTSSCTPSC

SEQ ID NO: 118 - protein, 62 aa, synthetic construct
GVNIGGVGSYLYNPPTPSPGCTTPLSPSSFSPPRPRTGLPQGKKSPPHMKTFTGETSLCPGC

SEQ ID NO: 119 - protein, 62 aa, synthetic construct
PEHSHLTQATVQPLDLGFTITPESKTEVELSPTMKETPTQPPKKVVPQLRVYQGVTNPTPGQ

SEQ ID NO: 120 - protein, 62 aa, synthetic construct
CSDSWQVDDCPESCCEPPCCAPAPCLSLVCTPVSRVSSPCCPVTCEPSPCQSGCTSSCTPSC

SEQ ID NO: 121 - protein, 62 aa, synthetic construct
GRSMTDVARALGCCSLPAESLDAEVMPQVRSPPLEPPKESMWYRKLKVFSGTASPSPGEETF

SEQ ID NO: 122 - protein, 62 aa, synthetic construct
LLPYPGAFQASGQALPSQARNPGAGAAPTDSPGLERGGMASPAKRVPLSSQTGTAALPYPLK

SEQ ID NO: 123 - protein, 62 aa, synthetic construct
CALAPNPSSEGHSPGPFFDPEFRLLEPVPSSPLQPLPPSPRVGSPGPHAHPPLPKRPPCKAR

SEQ ID NO: 124 - protein, 62 aa, synthetic construct
PTPLRTPTPVRTRTPIRTLTPVLTPSPAGTSPLVLTPAPAQIPTLVPTPALARIPRLVPPPA

SEQ ID NO: 125 - protein, 62 aa, synthetic construct
TPTPVRTRTPIRTLTPVLTPSPAGTSPLVLTPAPAQIPTLVPTPALARIPRLVPPPAPAWIP

SEQ ID NO: 126 - protein, 62 aa, synthetic construct
ALARIPRLVPPPAPAWIPTPVPTPVPVRNPTPVPTPARTLTPPVRVPAPAPAQLLAGIRAAL

SEQ ID NO: 127 - protein, 62 aa, synthetic construct
EFPSGSSSTSSTPLSSPIVDFYFSPGPPSNSPLSTPTKDFPGFPGIPKAGTHVLYPIPESSS

SEQ ID NO: 128 - protein, 62 aa, synthetic construct
ISGGESSLLPTRPTCLSHALLPSDHSCTHPTPKVGLPDEVNPQQAESLGFQSDDLPQFQYFR

SEQ ID NO: 129 - protein, 62 aa, synthetic construct
AVVVVTGRRCRSGQTVPGAARSPLLPHPLPSPLRVPPPTGALGRPLPRWPQPRRTPFWSVIS

SEQ ID NO: 130 - protein, 62 aa, synthetic construct
PTSPEPRPSHSQRNYSPVAGPSSEPSAHTSTPSIGNSQPSTPAPALPVQDPQLLHHCQHCDM

SEQ ID NO: 131 - protein, 62 aa, synthetic construct
SCGYMPVHLAMLAGEGHRPRRPRGALPPWLSPWLLLALTPLLSSEPPFLQLLCGLLAGLAYA

SEQ ID NO: 132 - protein, 62 aa, synthetic construct
CALAPNPSSERRSPRPIFDLEFHLLEPVPSSPLQPLPPSPSPGPHARPELPERPPCKVRRRL

SEQ ID NO: 133 - protein, 62 aa, synthetic construct
CALAPNPSSERRSPRPIFDLEFRLLEPVPSSPLQPLPPSPCVGSPGPHARSPLPERPPCKAR

SEQ ID NO: 134 - protein, 62 aa, synthetic construct
GSNRRLVKRLCAGLLPPPTSCPEGLPPVPLTPDIFWGCFLENETLWAERLCGEASLQAVPPS

SEQ ID NO: 135 - protein, 62 aa, synthetic construct
NPGADTSAPTGGGGGPGPGAGPGTGLPGGLSPLSPSPPMGAPLGMHGPAGYPAHGPGGLVCA

SEQ ID NO: 136 - protein, 62 aa, synthetic construct
TSAPTGGGGGPGPGAGPGTGLPGGLSPLSPSPPMGAPLGMHGPAGYPAHGPGGLVCAAQLPF

SEQ ID NO: 137 - protein, 62 aa, synthetic construct
ATHFSQLSLHNDHPYCSPPMTFSPALPPLRSPCSELLLWRYPGSLIPEALRLLRLGDTPSPP

SEQ ID NO: 138 - protein, 62 aa, synthetic construct
SLSASQPPEPSLPLEHPSPEPPALFPHPPHTPDPLACSLPPPKGFTAPPLRDSTLITPSHCD

SEQ ID NO: 139 - protein, 62 aa, synthetic construct
TCTDAHFPMQTEASVNGQMPQPEIGPPTFSSPLVIPPSQVSESHGQLSYQADLESETPGQLL

SEQ ID NO: 140 - protein, 62 aa, synthetic construct; identical to SEQ ID NO: 119

SEQ ID NO: 141 - protein, 62 aa, synthetic construct
PEYGAFGVPVKSLCHSASQSLPAMPVPIKPTPALPPVSALQPGLTVPAASQQPPAPSTVCSA

SEQ ID NO: 142 - protein, 62 aa, synthetic construct
SPSTCTGSSWQVDNCQESCCEPRSCASSCCTPSCCAPAPCLALVCAPVSCEPSPCQSGCTDS

SEQ ID NO: 143 - protein, 62 aa, synthetic construct
CSDSWQVDDCPESCCEPPCCAPAPCLSLVCTPVSRVSSPCCRVTCEPSPCQSGCTSSCTPSC

SEQ ID NO: 144 - protein, 62 aa, synthetic construct
PPGATGGLVMGYSQAEAQPLLTTLQAQPQDSPGAGGPLNFGPLHSLPPVFTSGLSSTTLPRF

SEQ ID NO: 145 - protein, 62 aa, synthetic construct
AGQACSPQRAWGAQRQGPSSQRPGSPPEKRSPFPQQPWSAVATQPCPRRAWTACETWEDPGP

SEQ ID NO: 146 - protein, 62 aa, synthetic construct
DTVRDPAVGLLRSCPHSLPAAPTLATPTLATPACPGALGPNWGRGAPGEWVSMQPQPLLPPT

SEQ ID NO: 147 - protein, 62 aa, synthetic construct; identical to SEQ ID NO: 138

SEQ ID NO: 148 - protein, 62 aa, synthetic construct
LEELEPQDYQQSNQPGPFQFSQAPQPPLFQSPQPKLPYLPTFPFSMPSSLTLPPPEDSLFMF

SEQ ID NO: 149 - protein, 62 aa, synthetic construct
LSATSSAQKITKSVKAPTVKPSETRVRAEPTPLPQFPFADTPDTYKSEAGVEVKKEVGVSIT

SEQ ID NO: 150 - protein, 62 aa, synthetic construct
PAAPLGAPTYIPTLEPVSRIRSLSPRSVSRSPIRMSPARMSPARMSPARMSPARMSPGRRLE

SEQ ID NO: 151 - protein, 62 aa, synthetic construct
GAPTYIPTLEPVSRIRSLSPRSVSRSPIRMSPARMSPARMSPARMSPARMSPGRRLEETDES

SEQ ID NO: 152 - protein, 62 aa, synthetic construct
IPTLEPVSRIRSLSPRSVSRSPIRMSPARMSPARMSPARMSPARMSPGRRLEETDESQLERL

SEQ ID NO: 153 - protein, 62 aa, synthetic construct
PVSRIRSLSPRSVSRSPIRMSPARMSPARMSPARMSPARMSPGRRLEETDESQLERLYKPVF

SEQ ID NO: 154 - protein, 62 aa, synthetic construct
RSLSPRSVSRSPIRMSPARMSPARMSPARMSPARMSPGRRLEETDESQLERLYKPVFVLKPV

SEQ ID NO: 155 - protein, 62 aa, synthetic construct
RSVSRSPIRMSPARMSPARMSPARMSPARMSPGRRLEETDESQLERLYKPVFVLKPVSFKCL

SEQ ID NO: 156 - protein, 62 aa, synthetic construct
PEVPPTKVPEVPKAAVPEKKVPEAIPPKPESPPPEVPEAPKEVVPEKKVPAAPPKKPEVTPV

SEQ ID NO: 157 - protein, 62 aa, synthetic construct
PEVPPTKVPEVPKVAVPEKKVPEAIPPKPESPPPEVFEEPEEVALEEPPAEVVEEPEPAAPP

SEQ ID NO: 158 - protein, 62 aa, synthetic construct
IELMRPVSELIRSRPQPAEEYEDDTERRSPTPERTRPRSPSPVSSERSLSRFERSARFDIFS

SEQ ID NO: 159 - protein, 62 aa, synthetic construct
EKAVTSPPRVKSPEPRVKSPEAVKSPKRVKSPEPSHPKAVSPTETKPTPTEKVQHLPVSAPP

SEQ ID NO: 160 - protein, 62 aa, synthetic construct
KSPEPRVKSPEAVKSPKRVKSPEPSHPKAVSPTETKPTPTEKVQHLPVSAPPKITQFLKAEA

SEQ ID NO: 161 - protein, 62 aa, synthetic construct
ESDKEDNGSEGQLTNREGPELPASKMQRSHSPVPAAAPAHSPSPASPRSVPGSSSQHSASPL

SEQ ID NO: 162 - protein, 62 aa, synthetic construct
NSGEKGDQGFQGQPGFPGPPGPPGFPGKVGSPGPPGPQAEKGSEGIRGPSGLPGSPGPPGPP

SEQ ID NO: 163 - protein, 62 aa, synthetic construct
DTISKNGTLSSVTSARALRPPHGPPRPGALTPTPSLSSQALPSPRLPTTDGAHPQPISPIPG

SEQ ID NO: 164 - protein, 62 aa, synthetic construct
TSARALRPPHGPPRPGALTPTPSLSSQALPSPRLPTTDGAHPQPISPIPGGVSSSGLSRMGA

SEQ ID NO: 165 - protein, 62 aa, synthetic construct
QLLEYERSLKLLAALQGDPGTPSGTPEPPPSPAAGAPLPRLPPPTSESAATGNAAAREGGLS

SEQ ID NO: 166 - protein, 62 aa, synthetic construct
DIKSAYAPSRRPDGPGPPDPGEAPKLCKLDSPSGAALGLSSPSPDSPDAAPEARPRPRRRPR

SEQ ID NO: 167 - protein, 62 aa, synthetic construct
RPDGPGPPDPGEAPKLCKLDSPSGAALGLSSPSPDSPDAAPEARPRPRRRPRPPAGSPARSP

SEQ ID NO: 168 - protein, 62 aa, synthetic construct
GPPDPGEAPKLCKLDSPSGAALGLSSPSPDSPDAAPEARPRPRRRPRPPAGSPARSPAHSLG

SEQ ID NO: 169 - protein, 62 aa, synthetic construct
PRHGLSALSAPGLPGPGQPAGPGAWAPPLDSPGTPSPDGPWCFSPEGAQGAGGVLFAPFGRA

SEQ ID NO: 170 - protein, 62 aa, synthetic construct
SALSAPGLPGPGQPAGPGAWAPPLDSPGTPSPDGPWCFSPEGAQGAGGVLFAPFGRAGAPGP

SEQ ID NO: 171 - protein, 62 aa, synthetic construct
KCHRAPIFMRVPFLEFKVPGIPSGMETLKNTPAPRLLKTHLPLALLPQTLLDQKVKVVYVAR

SEQ ID NO: 172 - protein, 62 aa, synthetic construct
TVLGVACGHLLSVWWRHRPQAPAAAAPWSASPGRAPAPSALPRAKVQSLKMSLLLALLFVGC

SEQ ID NO: 173 - protein, 62 aa, synthetic construct
SEDTDTDGEEETSQPPPQASHPSAHFQSPPTPFLPFASTLPLPPAPPGPSAPDEEDEEDYDS

SEQ ID NO: 174 - protein, 62 aa, synthetic construct
FRGHLTRTKLLASKAHGSEPPSVPGLPDQSSPVPRVPSPIAQATGSPVQEEAIVIIQSALRA

SEQ ID NO: 175 - protein, 62 aa, synthetic construct
INLLQQQIQQVNMPYVMIPAFPPSHQPLPVTPDSQLALPIQPIPCKPVEYPLQLLHSPPAPV

SEQ ID NO: 176 - protein, 62 aa, synthetic construct
QDFMAQCLRESSPAARPSPEKVPPVLPAPLTPHGTSPVGPPTPPPAPTDPQLTKARKQEEDD

SEQ ID NO: 177 - protein, 62 aa, synthetic construct
QCLRESSPAARPSPEKVPPVLPAPLTPHGTSPVGPPTPPPAPTDPQLTKARKQEEDDSLSDA

SEQ ID NO: 178 - protein, 62 aa, synthetic construct
STSSSLILGGPEEEEVPSGVIPNLTESIPSSPPQGPPQGPSQSPLSSCCSSFSWSSFSEESS

SEQ ID NO: 179 - protein, 62 aa, synthetic construct
GLPGLKGDRGEKGEAGPAGPPGLPGTTSLFTPHPRMPGEQGPKGEKGDPGLPGEPGLQGRPG

SEQ ID NO: 180 - protein, 62 aa, synthetic construct
EKEGMSYLDFAAGFEDPPMRGPETTPPQPPTPSKSYVNSHFITAEECLKLFPRRLKESFRDP

SEQ ID NO: 181 - protein, 62 aa, synthetic construct
PNPSSASEYGHLADVDPLSTSPVHTLGGWTSPATSESHGHPSSSTLPEEEEEEDEEGYCPRC

SEQ ID NO: 182 - protein, 62 aa, synthetic construct
LKVLVKLAENTSCDFLPRFQCVFQVLPKCLSPETPLPSVLLAVELLSLLADHDQLAPQLCSH

SEQ ID NO: 183 - protein, 62 aa, synthetic construct
NRVEAHGEATATAPPSPAAETKVYSLPLSLTPTGQGGEAMPTTPESPRADFRETGETSPAQV

SEQ ID NO: 184 - protein, 62 aa, synthetic construct
TLGQDSLGPPEHFQGGPRGNEPAAHPPRWSTPSSYEDPAGGKHCEHPISGLEVLEAEQNSLH

SEQ ID NO: 185 - protein, 62 aa, synthetic construct
DIKPYSSSDREFLKVAVEPPWPLNRAPRRATPPAHPPPRSSSLGNSPERGPLRPFVPEQELL

SEQ ID NO: 186 - protein, 62 aa, synthetic construct
AVEPPWPLNRAPRRATPPAHPPPRSSSLGNSPERGPLRPFVPEQELLRSLRLCPPHPTARLL

SEQ ID NO: 187 - protein, 62 aa, synthetic construct
KIKLLDTPSKPVLPLVPPSPFPSTQLPLVTTPETLVQPGTPARRCRSLPSSPELPRRMETAL

SEQ ID NO: 188 - protein, 62 aa, synthetic construct
AAGSKLKVKEASPADAEPPQASPGQGAGSPTPQLLPPIEEHPKIWLPRALRQTYIRKVGDTV

SEQ ID NO: 189 - protein, 62 aa, synthetic construct
SEDNIYEDIIYPTKENPYEDIPVQPLPMWRSPSAWKLPPAKSAFKAPKLPPKPQFLHRKTME

SEQ ID NO: 190 - protein, 62 aa, synthetic construct
DHMVHTSPSEVFVNQRSPSSTQANSIVLESSPSQETPGDGKPPALPPKQSKKNSWNQIHYSH

SEQ ID NO: 191 - protein, 62 aa, synthetic construct
TSPSEVFVNQRSPSSTQANSIVLESSPSQETPGDGKPPALPPKQSKKNSWNQIHYSHSQQDL

SEQ ID NO: 192 - protein, 62 aa, synthetic construct
HYFYDYDCGEDFYRSTAPSEDIWKKFELVPSPPTSPPWGLGPGAGDPAPGIGPPEPWPGGCT

SEQ ID NO: 193 - protein, 62 aa, synthetic construct
PCRRPQLDLDILSSLIDLCDSPVSPAEASRTPGRAEGAGRPPPATPPRPPPSTSAVRRVDVR

SEQ ID NO: 194 - protein, 62 aa, synthetic construct
GAGRPPPATPPRPPPSTSAVRRVDVRPLPASPARPCPSPGPAAASSPARPPGLQRSKSDLSE

SEQ ID NO: 195 - protein, 62 aa, synthetic construct
VCAGQRVANSRDDSTSPLDGAPWPGLLLELSPSTEEPLVTHAPRPAGNPQNASRKKSPRPKQ

SEQ ID NO: 196 - protein, 62 aa, synthetic construct
TAGKLGPTLGAGTTRSPGSPPTLRVHGDTGSPRKPWPERRPPRPAATRTAPPTPSPGPSASP

SEQ ID NO: 197 - protein, 62 aa, synthetic construct
NPDLILTSPDFALSTPDSSVVPALTPEPSPTPLPTLPKELTSDPSTPSEVTSLSPTSEQVPE

SEQ ID NO: 198 - protein, 62 aa, synthetic construct
PALESSPSRSSTATSMDPLSTEDFKPPRSQSPNLTPPPTHTPHSASDLTVSPDPLLSPTAHP

SEQ ID NO: 199 - protein, 62 aa, synthetic construct
STATSMDPLSTEDFKPPRSQSPNLTPPPTHTPHSASDLTVSPDPLLSPTAHPLDHPPLDPLT

SEQ ID NO: 200 - protein, 62 aa, synthetic construct
TEDFKPPRSQSPNLTPPPTHTPHSASDLTVSPDPLLSPTAHPLDHPPLDPLTLGPTPGQSPG

SEQ ID NO: 201 - protein, 62 aa, synthetic construct
SDLTVSPDPLLSPTAHPLDHPPLDPLTLGPTPGQSPGPHGPCVAPTPPVRVMACEPPALVEL

SEQ ID NO: 202 - protein, 62 aa, synthetic construct
GGVVNVGADIKKTMEGPVEGRDTAELPARTSPMPGHPTASPTSSEVQQVPSPVSSEPPKAAR

SEQ ID NO: 203 - protein, 62 aa, synthetic construct
RDTAELPARTSPMPGHPTASPTSSEVQQVPSPVSSEPPKAARPPVTPVLLEKKSPLGQSQPT

SEQ ID NO: 204 - protein, 62 aa, synthetic construct
PTTVYPYRSPTYSVVIPSLQNPITHPVGETSPAIQLPTPAVQSPSPVTLFQPSVSSAAQVAV

SEQ ID NO: 205 - protein, 62 aa, synthetic construct
HARFATSTIQPPREYSSVSPCPRSAPIPQASPIPHPHVYQPPPLGHPATLFGTPPRFSFHHP

SEQ ID NO: 206 - protein, 62 aa, synthetic construct
AGRVTYGATARASEAVEDTFRFRVTAPPYFSPLYTFPIHIGGDPDAPVLTNVLLVVPEGGEG

SEQ ID NO: 207 - protein, 62 aa, synthetic construct
SPQVSLGDGQSEEASESSSPVPEDRPTPPPSPGGDTPHQRPGSQTGPSSSRASSWGNCWQKD

SEQ ID NO: 208 - protein, 62 aa, synthetic construct
DSNTVQLPLQKRLVPTRSIPVRGLGAPDFTSPSGSCPAPLPAPSPPPLCNLWELKLLSRRFP

SEQ ID NO: 209 - protein, 62 aa, synthetic construct
GIGIPGRTGAQGPAGEPGIQGPRGLPGLPGTPGTPGNDGVPGRDGKPGLPGPPGDPIALPLL

SEQ ID NO: 210 - protein, 62 aa, synthetic construct
SQGERGKPGLTGMKGAIGPMGPPGNKGSMGSPGHQGPPGSPGIPGIPADAVSFEEIKKYINQ

SEQ ID NO: 211 - protein, 62 aa, synthetic construct
QLLSCRMTALEKQVAEILKILSEKSVPQASSPKSQMPLQVPPQIPCQDIFSVSRPESPESDK

SEQ ID NO: 212 - protein, 62 aa, synthetic construct
QVIARRQEPALRGSPGPLTPHPCNELGPPASPRTPRPVRRGSGRRLPRPDSLIFYRQKRDCK

SEQ ID NO: 213 - protein, 62 aa, synthetic construct
HELAQKRKRGPGLPLVPQAKKDRSDWLIVFSPDTELPPSGSPGGSSAPPREVTTFKELRSRS

SEQ ID NO: 214 - protein, 62 aa, synthetic construct
RKASPTRTHWVPQADKRRRSLPSSYRPAQPSPSAVQTPPSPPVSPRVLSPPTTKRRTSPPHQ

SEQ ID NO: 215 - protein, 62 aa, synthetic construct
ADKRRRSLPSSYRPAQPSPSAVQTPPSPPVSPRVLSPPTTKRRTSPPHQPKLPNPPPESAPA

SEQ ID NO: 216 - protein, 62 aa, synthetic construct
KVSGNTHSIFCPATSSLFEAKPPLSTAHPLTPPSLPPEAGGPLGNPAECWKNSSGPWLRADS

SEQ ID NO: 217 - protein, 62 aa, synthetic construct
AALGCEPRKTLTPEPAPSLSRPGPAAPVTPTPGCCTDLRGLELRVQRNAEELGHEAFWEQEL

SEQ ID NO: 218 - protein, 62 aa, synthetic construct
ALGFSTYSVAQVPRWKPQARAPQPIPRRSWSPALTIENEHIRATFDPDTGLLMEIMNMNQQL

SEQ ID NO: 219 - protein, 62 aa, synthetic construct
RRPLLGASNQALARWLPAEYEDGLSLPFGWTPSRRRNGFLLPLVRAVSNQIVRFPNERLTSD

SEQ ID NO: 220 - protein, 62 aa, synthetic construct
EVREGHALGGGMEADGPASLQELPPSPRSPSPPPSPPPLPSPPSLPSPAAPEAPELPEPAQP

SEQ ID NO: 221 - protein, 62 aa, synthetic construct
GMEADGPASLQELPPSPRSPSPPPSPPPLPSPPSLPSPAAPEAPELPEPAQPSEAHARQLLL

SEQ ID NO: 222 - protein, 62 aa, synthetic construct
PASLQELPPSPRSPSPPPSPPPLPSPPSLPSPAAPEAPELPEPAQPSEAHARQLLLEEWGPL

SEQ ID NO: 223 - protein, 62 aa, synthetic construct
RGLPRGVDGQTGSGTVPGAEGFAGAPGYPKSPPVASPGAPVPSLVSFSAGLTQKPFPSDGGV

SEQ ID NO: 224 - protein, 62 aa, synthetic construct
GNTDTKKDDEKVKKNEPLHEKEAKDDSKTKTPEKQTPSGPTKPSEGPAKVEEEAAPSIFDEP

SEQ ID NO: 225 - protein, 62 aa, synthetic construct
GKDAPKGAPKEAPPKEAPAEAPKEAPPEDQSPTAEEPTGVFLKKPDSVSVETGKDAVVVAKV

SEQ ID NO: 226 - protein, 62 aa, synthetic construct
TSAPSSEKQSPMAQQSPLAQQSPLAQPSPATPNSPIAQPAPPQPLQLQGHENSYRSEVKARQ

SEQ ID NO: 227 - protein, 62 aa, synthetic construct
DEPAPWSSPAAAAPGLPEVGVSLDDGLAPFSPSHPAPPSDPSHQISPGPTWDIKREHDVRKP

SEQ ID NO: 228 - protein, 62 aa, synthetic construct
LPEVGVSLDDGLAPFSPSHPAPPSDPSHQISPGPTWDIKREHDVRKPKELSACGQKKQRLGE

SEQ ID NO: 229 - protein, 62 aa, synthetic construct
LDLRLRLAQPSSPEVLTPQLSPGSGTPQAGTPSPSRSRDSNSGPEEPLLEEEEKQWGPLERE

SEQ ID NO: 230 - protein, 62 aa, synthetic construct
QGKPGSPEPETEPVSSVQENHENERIPRPLSPTKLLPFLSNPYRNQSDADLEALRKKLSNAP

SEQ ID NO: 231 - protein, 62 aa, synthetic construct
PPVYTATSLSHSNLHSPSPSTQTPQPSAILSPCSYTTAVCSPPVQSPLAARTFHYASPTASQ

SEQ ID NO: 232 - protein, 62 aa, synthetic construct
PTASQLSLMQQQPQQQVQQSQPPQTQPQQPSPQPQTPGSSTPKNEVHKSTQALHNTNLTREV

SEQ ID NO: 233 - protein, 62 aa, synthetic construct
LSLMQQQPQQQVQQSQPPQTQPQQPSPQPQTPGSSTPKNEVHKSTQALHNTNLTREVRPLSA

SEQ ID NO: 234 - protein, 62 aa, synthetic construct
QQPQQQVQQSQPPQTQPQQPSPQPQTPGSSTPKNEVHKSTQALHNTNLTREVRPLSASQPSL

SEQ ID NO: 235 - protein, 62 aa, synthetic construct
NERPARELLTDIRSTLIRCETRKCRKPVAVSPELGQRIRDFPQQALPLQREMKMFLEKLCFE

SEQ ID NO: 236 - protein, 62 aa, synthetic construct
VSQLSRELRHIMGLLQARLGPPGHPAGSAWTPDPPCPQLRPPCLSPCASRPPPSLQDTTLAE

SEQ ID NO: 237 - protein, 62 aa, synthetic construct
APTTLSTTTGPAPTTPVATTVPAPTTPRTPTPDLPSSSNSSVLPTPPATEAPSSPPPEYVCN

SEQ ID NO: 238 - protein, 62 aa, synthetic construct
LPGIRGGPGRTGLAGAPGPPGVKGSSGLPGSPGIQGPKGEQGLPGQPGIQGKRGHRGAQGDQ

SEQ ID NO: 239 - protein, 62 aa, synthetic construct
GTVPLARLQPRTFYNASWSSRATSPTPSSRSPAPPKPRQKQHLRKGPPHQKGSKRPSKANTT

SEQ ID NO: 240 - protein, 62 aa, synthetic construct
DETPLQKPTSTRAAIRSHGSFPVPLTRRRGSPRVFNFDFRRPGPEPPRQLNYIQVELKGWGG

SEQ ID NO: 241 - protein, 62 aa, synthetic construct
PSLSEEILRCLSLHDPPDGALDIDLLPGAASPYLGIPWDGKAPCQQVLAHLAQLTIPSNFTA

SEQ ID NO: 242 - protein, 62 aa, synthetic construct
NAPSYNWGAALRSSLVPSDLGSPPAPHASSSPPSDPPLFHCSDALTPPPLPPSNNLPAHPGP

SEQ ID NO: 243 - protein, 62 aa, synthetic construct
VPSDLGSPPAPHASSSPPSDPPLFHCSDALTPPPLPPSNNLPAHPGPASQPPVSSATMHLPL

SEQ ID NO: 244 - protein, 62 aa, synthetic construct
ASHSSSLRPSQRRPRRPPTVFRLLEGRGPQTPRRSRPRAPAPVPQPFSLPEPSQPILPSVLS

SEQ ID NO: 245 - protein, 62 aa, synthetic construct
PSLPGTTSGSLSSVPGAPAPPAASKAPVVPSPVLQSPSEGLGMGAGPACPLPPLAGGEAFPF

SEQ ID NO: 246 - protein, 62 aa, synthetic construct
TTSGSLSSVPGAPAPPAASKAPVVPSPVLQSPSEGLGMGAGPACPLPPLAGGEAFPFPSPEQ

SEQ ID NO: 247 - protein, 62 aa, synthetic construct
APCLPPESPASALEPEPARPPLSALAPPHGSPDPPVPELLTGRGSGKRGRRGGGGLRGINGE

SEQ ID NO: 248 - protein, 62 aa, synthetic construct
LYNHMKYSLCKDSLSLLLDSPDWACRRGSTTPRPHAPTPDRPGESDPGRQPQGARPTGAAPA

SEQ ID NO: 249 - protein, 62 aa, synthetic construct
AAAHVPFLASASPLLPPATAFPAVQPPQRPTPAPRLYYPLLLEHTLGLPAGKAALAKAPVSP

SEQ ID NO: 250 - protein, 62 aa, synthetic construct
SLTRFCSRSSLPTGSSVMLWPEDGDPGGPETPGPEGPLPLQPRGPVPGSPEHVGEDLTRALG

SEQ ID NO: 251 - protein, 62 aa, synthetic construct
LMQQQIMAVAGLDSSKAQKYSPSHSTRSWATPPATPPYRDWTPCYTPLIQVEQSEALDQVNG

SEQ ID NO: 252 - protein, 62 aa, synthetic construct
FSTALGTFLFLAEVVLVGWVKFVPIGAPLDTPTPMVPTSRVPGTLAPVATSLSPASNLPRSS

SEQ ID NO: 253 - protein, 62 aa, synthetic construct
GPPLPFPYAPYAPAPGPALLVPPPSAGPGPSPPARLFSVDSLVNLQPELAGLGAPEPPCCAA

SEQ ID NO: 254 - protein, 62 aa, synthetic construct
SSPAAPAASSASPMFKPIFTAPPKSEKEGLTPPGPSVSATAPSSSSLPTTTSTTAPTFQPVF

SEQ ID NO: 255 - protein, 62 aa, synthetic construct
AADFSGFGSTLATSAPATSSQPTLTFSNTSTPTFNIPFGSSAKSPLPSYPGANPQPAFGAAE

SEQ ID NO: 256 - protein, 62 aa, synthetic construct
LQGIQKIYGPPAEPLEPTRPLPTLPVRRIHSPSERKHERQPRPPRPPLGDRPSTPGTKPNIC

SEQ ID NO: 257 - protein, 62 aa, synthetic construct
PPRGPGFFREEITTFIDETPLPSPTASPGHSPRRPRPLGLSPRRLSLGSPESRAVGLPLGLS

SEQ ID NO: 258 - protein, 62 aa, synthetic construct
GNPMANANNPMNPGGNPMASGMTTSNPGLNSPQFAGQQQQFSAKAGPAQPYIQQSMYGRPNY

SEQ ID NO: 259 - protein, 62 aa, synthetic construct
YSNYSQGNVNRPPRPVPVANYPHSPVPGNPTPPMTPGSSIPPYLSPSQDVKPPFPPDIKPNM

SEQ ID NO: 260 - protein, 62 aa, synthetic construct
FQARVQALGWPLRQPQPRGVEPQPPAAPAVTPAQTPTLAPDPCPPCPDTRGRAHRLLHYCGS

SEQ ID NO: 261 - protein, 62 aa, synthetic construct
AVLIQQTPEVIKIQNKPEKKPGTPLPPPATSPSSPRPLSPVPHVNNVVNAPLSINIPRFYFP

SEQ ID NO: 262 - protein, 62 aa, synthetic construct
SPEEAARGAGPRPNMFDVLTFPGTGKAPFGSPAADAPPPAVAAAEVPGSEGGSATGESACHF

SEQ ID NO: 263 - protein, 62 aa, synthetic construct
LYGKAPQTPYDKPTRKPLAPPPQPPASPTHSPSFPIPDRCEGNFDAIANIRGETFFFKGPWF

SEQ ID NO: 264 - protein, 62 aa, synthetic construct
GRKKNKEIWTSSPPPDSAENQTSTDIPKTETPAPNLPPTPTPLVVTSTVTTGLNATILERSL

SEQ ID NO: 265 - protein, 62 aa, synthetic construct
SSPPPDSAENQTSTDIPKTETPAPNLPPTPTPLVVTSTVTTGLNATILERSLDPDSGTELGT

SEQ ID NO: 266 - protein, 62 aa, synthetic construct
FPGPKGGPGDPGPTGLKGDKGPPGPVGANGSPGERGPLGPAGGIGLPGQSGSEGPVGPAGKK

SEQ ID NO: 267 - protein, 62 aa, synthetic construct
DPGPPGPIGSLGHPGPPGVAGPLGQKGSKGSPGSMGPRGDTGPAGPPGPPGAPAELHGLRRR

SEQ ID NO: 268 - protein, 62 aa, synthetic construct
PLHCSHPLGSLALGQSPGVSMMSPVPGCPPSPAYYSPATYHPLHSNLQAHLGQLSPPPEHPG

SEQ ID NO: 269 - protein, 62 aa, synthetic construct
IVASEEASEVPLWLDRKESAVPTTPAPLQISPFTSQPYVAHTLPQRPEPGEPGPDMAQEAPQ

SEQ ID NO: 270 - protein, 62 aa, synthetic construct
GSQQGPEEEAAEALLTETVRSQTHSLPAPESPEPAAPPRPQTPENGPEASDPSEELEALASL

SEQ ID NO: 271 - protein, 62 aa, synthetic construct
LSPHQGLPPSQPPFSSTQSRRPSSPPPASPSPGFQFGSCDSNSDFAPHPYSPSLPSSPTFFH

SEQ ID NO: 272 - protein, 62 aa, synthetic construct
ASTTVSPSDTANCSVTKIPTPVPKSIPISETPNIPPVSVQPPASIGPPLGVPPRSPPMVMTN

SEQ ID NO: 273 - protein, 62 aa, synthetic construct
LKLKIKLGGQVLGTKSVPTFTVIPEGPRSPSPLMVVDNEEEPMEGVPLEQYRAWLDEDSNLS

SEQ ID NO: 274 - protein, 62 aa, synthetic construct
PMVRYCSGAQGSTLSFPPGVPAPTAVSQRPSPSGPPPRCSVPGCPHPRRYACSRTGQALCSL

SEQ ID NO: 275 - protein, 62 aa, synthetic construct
YAQREDFEAAGSPFSGGPVSFPLAPGPHFGTPGYGSPHFTALYSSVPFPEGEAFPPVSVTTL

SEQ ID NO: 276 - protein, 62 aa, synthetic construct
DFEAAGSPFSGGPVSFPLAPGPHFGTPGYGSPHFTALYSSVPFPEGEAFPPVSVTTLGSPMH

SEQ ID NO: 277 - protein, 62 aa, synthetic construct
FPDVRPRLASIVSPSLTSTFVPSQSATSTETPSASPPSSTSSHKSFPKIFQTFRKDMSEMSI

SEQ ID NO: 278 - protein, 62 aa, synthetic construct
LACASLGLLYASTRDAPGLRLPLAPWAPPQSPRRPELPDLAPEPRYAHIPVRIKEQVVGLLA

SEQ ID NO: 279 - protein, 62 aa, synthetic construct
ANENSIRQAQEPTGWLPGGTQDSPQAPKPITPPTSHQKAQSAPKSPPRLPEGHGDGQSSEKA

SEQ ID NO: 280 - protein, 62 aa, synthetic construct
TGSKGVADDVVPPGPGPAPEAPAQEGPGSGSPRDTRPLSTQRPLPPLCSLETIAEEPAPGPG

SEQ ID NO: 281 - protein, 62 aa, synthetic construct
LKCPTEVLLTPPTPLPPPSPPPTASDRGLATPSPSPCPVPRPLAALKPVRLHSFQEHVFKRA

SEQ ID NO: 282 - protein, 62 aa, synthetic construct
IRSSEEGPGDSASPVFTAPAESEGPGPEEKSPGQQLPKATLRKDVGPMYSYVALYKFLPQEN

SEQ ID NO: 283 - protein, 62 aa, synthetic construct
EEEEEEEGDGEGQEGGDPGSEAPAPGPLIPSPSVEEPHKHRPTTLRLTTLGAQDSLNNNGGF

SEQ ID NO: 284 - protein, 62 aa, synthetic construct
TNHSSTVTSTQPTGAPTAPESPTEESSSDHTPTSHATAEPVPQEKTPPTTVSGKVMCELIDM

SEQ ID NO: 285 - protein, 62 aa, synthetic construct
QSLYGKPLGGSVAVQLPGKLFTDFETWDSYSPQGRRPETQGPKYCHSSFDAITVDRQQQLYI

SEQ ID NO: 286 - protein, 62 aa, synthetic construct
EGKGKKGETALKRKGSPKGKSSGGKVPVKKSPADSTDTSPVAIVPQPPKPGSEEWVYVNEPV

SEQ ID NO: 287 - protein, 62 aa, synthetic construct
EGKKPSPEVKIPTQRKPISSIHAREPQSPESPEVTQNPPTQPKVAKPDLPEEKGKKGISSFK

SEQ ID NO: 288 - protein, 62 aa, synthetic construct
PVRPVPQGTPPVVEEQPQPPLAMPPYPLPYSPSPSLPVGPTAHGALPPAPFPVVSQPSFYSG

SEQ ID NO: 289 - protein, 62 aa, synthetic construct
RPVPQGTPPVVEEQPQPPLAMPPYPLPYSPSPSLPVGPTAHGALPPAPFPVVSQPSFYSGPL

SEQ ID NO: 290 - protein, 62 aa, synthetic construct
LRQGVLRAQALRPPDGPGWDCALLPSPGPRSPRAVGCAEPEIWDPSPRRGTSPVPSVRSLRS

SEQ ID NO: 291 - protein, 62 aa, synthetic construct
PCSPSGHWSPREAEGHPDVEQPCKSSVRTWSPNSAVNPHTVPPACPEPQGCYLELEFLYPLV

SEQ ID NO: 292 - protein, 62 aa, synthetic construct
GKGPGQDRPPLGPTVPYTEALQVFHHPVAQTPLHEKPYLPPPVSLFSFQHLVQHEPGQSPEF

SEQ ID NO: 293 - protein, 62 aa, synthetic construct
SLFSFQHLVQHEPGQSPEFFSTQAMSSLLSSPYSMPPLPPSLFQAPPLPLQPTVLHPGQLHL

SEQ ID NO: 294 - protein, 62 aa, synthetic construct
DYPKERERTGGGPGRPPDWTPHGTGAPAEPTPTHSPCTPPDTLPRPPQGRRAAQSWSPRLES

SEQ ID NO: 295 - protein, 62 aa, synthetic construct
TLHSKETSSYRLGSQPSHQVPTPSPRPRVFTPQSSPAMPLAPSHPSPYQGPRTQNISDYRAP

SEQ ID NO: 296 - protein, 62 aa, synthetic construct
PSHQVPTPSPRPRVFTPQSSPAMPLAPSHPSPYQGPRTQNISDYRAPGPQAIQPLPLSPGVR

SEQ ID NO: 297 - protein, 62 aa, synthetic construct
PQQPHALPPHAHRRPASALPSRRDGTPTKTTPCEIPPPFPNLLQHRPPLLAFPQAKSASRTP

SEQ ID NO: 298 - protein, 62 aa, synthetic construct
AGGRRGNCFFIQDDDSGEELKGHGAAPPIPSPPPSPPPSPAPLEPSSRVGRGEALFGGPVGA

SEQ ID NO: 299 - protein, 62 aa, synthetic construct
VAHSRGHVRLARCLEELQRQEPSVEPPFALSPPSSSPDTGLSSVSSPSELSDGTFSVTSAYS

SEQ ID NO: 300 - protein, 62 aa, synthetic construct
GHVRLARCLEELQRQEPSVEPPFALSPPSSSPDTGLSSVSSPSELSDGTFSVTSAYSSAPDG

SEQ ID NO: 301 - protein, 62 aa, synthetic construct
AYYGETDSDADGPATQEKPRRPRRRGPTRPTPPGAPPDEVYLSDSPAEPAPTIPGPPSQGDS

SEQ ID NO: 302 - protein, 62 aa, synthetic construct
TQEKPRRPRRRGPTRPTPPGAPPDEVYLSDSPAEPAPTIPGPPSQGDSRVSSPSWEDGAALQ

SEQ ID NO: 303 - protein, 62 aa, synthetic construct
GEGLQSPPRAQSAPPEAAVLPPSPLPAPVASPRPFQPGGGAPTPAPSIFNRSARPFTPGLQG

SEQ ID NO: 304 - protein, 62 aa, synthetic construct
ACNFMQPVGARSYKTLPHVTPKTPPPMAPKTPPPMTPKTPPPVAPKPPSRGLLDGLVNGAAS

SEQ ID NO: 305 - protein, 62 aa, synthetic construct
QPVGARSYKTLPHVTPKTPPPMAPKTPPPMTPKTPPPVAPKPPSRGLLDGLVNGAASSAGIP

SEQ ID NO: 306 - protein, 62 aa, synthetic construct
FAKRQSRADRYVVEGTPGPGLGPRPRSPSPTPSLPPSWKYSPNIRAPPPIAYNPLLSPFFPQ

SEQ ID NO: 307 - protein, 62 aa, synthetic construct
CCEYVPCGPSPAPGTSPQPSLSASTEPAVPTPTQTTATEKTTLWVTPSIRSTAALTSQTGSS

SEQ ID NO: 308 - protein, 62 aa, synthetic construct
TPGTAHTTKVPTTTTTGFTATPSSSPGTALTPPVWISTTTTPTTTTPTTSGSTVTPSSIPGT

SEQ ID NO: 309 - protein, 62 aa, synthetic construct
ASCKDMAKTWLVPDSRKDGCWAPTGTPPTASPAAPVSSTPTPTPCPPQPLCDLMLSQVFAEC

SEQ ID NO: 310 - protein, 62 aa, synthetic construct
LVPDSRKDGCWAPTGTPPTASPAAPVSSTPTPTPCPPQPLCDLMLSQVFAECHNLVPPGPFF

SEQ ID NO: 311 - protein, 62 aa, synthetic construct
KIPKKRGRKPGYKIKSRVLMTPLALSPPRSTPEPDLSSIPQDAATVPSLAAPQALTVCLYIN

SEQ ID NO: 312 - protein, 62 aa, synthetic construct
PPVLPLQPCSPAQPPVLPALAPAPACPLPTSPPVPAPHVTPHAPGPPDHPNQPPMMTCERLP

SEQ ID NO: 313 - protein, 62 aa, synthetic construct
QRISNQLHGTIAVVRPGSQACPADRGPANGTPPPLPARSSPPSPAYERGLSLDSFLRASRPS

SEQ ID NO: 314 - protein, 62 aa, synthetic construct
VPKATSFAEPPDYSPVTHNVPSPIGEIQPLSPQPSAPIASSPAIDMPPQSETISSPMPQTHV

SEQ ID NO: 315 - protein, 62 aa, synthetic construct
PDYSPVTHNVPSPIGEIQPLSPQPSAPIASSPAIDMPPQSETISSPMPQTHVSGTPPPVKAS

SEQ ID NO: 316 - protein, 62 aa, synthetic construct
SAPIASSPAIDMPPQSETISSPMPQTHVSGTPPPVKASFSSPTVSAPANVNTTSAPPVQTDI

SEQ ID NO: 317 - protein, 62 aa, synthetic construct
DMPPQSETISSPMPQTHVSGTPPPVKASFSSPTVSAPANVNTTSAPPVQTDIVNTSSISDLE

SEQ ID NO: 318 - protein, 62 aa, synthetic construct
SSLSTPLPEPHIDLELVWRNVQQREVPQGPSPLAVDPLHPVPQPPTLAEAVKIERTHPGLPK

SEQ ID NO: 319 - protein, 62 aa, synthetic construct
VAANVLNFSDHHVIPMPLLKGTDDLNPVTSTPAKPSSPPPEFSFNTPGKNVNPVILLNTQTR

SEQ ID NO: 320 - protein, 62 aa, synthetic construct
FFHSCPGLPALSNQLAILGRVPSPVLPGVSSPAYPIPALRTAPLRRATGIILPARRNVLPSR

SEQ ID NO: 321 - protein, 62 aa, synthetic construct
WTGSGFAKVLPPSPWAPAPADGPQPPKDSATPLSPQPPSEEPATSPWPAEQSPKSRTSEEMG

SEQ ID NO: 322 - protein, 62 aa, synthetic construct
EAERQALAQLEKAKTKPVAFAVRTNVGYNPSPGDEVPVQGVAITFEPKDFLHIKEKYNNDWW

SEQ ID NO: 323 - protein, 62 aa, synthetic construct
YNIKNREVHLHSEPVHPPGKIPHQGPPLPPTPHLPPFPLENGGMGISHSNSFPPIRPATVPP

SEQ ID NO: 324 - protein, 62 aa, synthetic construct
HTPAGQAIHSPAPQSPAPSPEGTSTSPAPVTPAAAVPEAPSVTPTAPPEDEDPALSPHLLLP

SEQ ID NO: 325 - protein, 62 aa, synthetic construct
SSWPSATLKRPPARRGPGLDRTQPPAPPGVSPQALPSRARAPATCAPPRPAGSGHSPARTTY

SEQ ID NO: 326 - protein, 62 aa, synthetic construct
ATSSSAASSWPTAASPPGGPQHHQPQPPLWTPTPPSPASDWPPLAPQQATSEPRAHPAMEAE

SEQ ID NO: 327 - protein, 62 aa, synthetic construct
YDLLRKSSEAKEPQKLPEHMNPPAAWEAQKTPEFKEPQKPPEPQDLLPWEPPAAWELQEAPA

SEQ ID NO: 328 - protein, 62 aa, synthetic construct
EMPAPESPPGRDPAANLSLALPDDDGSDDSSPPSASPAESEPQCDPSFKGDAGENTALLEAG

SEQ ID NO: 329 - protein, 62 aa, synthetic construct
ESPPGRDPAANLSLALPDDDGSDDSSPPSASPAESEPQCDPSFKGDAGENTALLEAGRSDSR

SEQ ID NO: 330 - protein, 62 aa, synthetic construct
GYGNASNWISTKTLPGPPDGPPENVHVVATSPFSISISWSEPAVITGPTCYLIDVKSVDNDE

SEQ ID NO: 331 - protein, 62 aa, synthetic construct
YPEPALHPGPGQAPVPAQVPAPAPGFALFPSPGPVALGSAAPFLPLPGVPSGLEFLVQIDQI

SEQ ID NO: 332 - protein, 62 aa, synthetic construct
TTTSVPVTTTVSTFVPPMPLPRQNHEPVATSPSSPQPAETHPTTLQGAIRREPTSSPLYSYT

SEQ ID NO: 333 - protein, 62 aa, synthetic construct
RRKYDRGLLSDEDLRGPGVRPSRTPAPDPGSPRTPPPTSRTHDGSRASPGANRTMFNFDAFY

SEQ ID NO: 334 - protein, 62 aa, synthetic construct
RKPALGAANRALARWLPAEYEDGLSLPFGWTPGKTRNGFPLPLAREVSNKIVGYLNEEGVLD

SEQ ID NO: 335 - protein, 62 aa, synthetic construct
SSNPYLGPGYPGFGGYSTFRMPPHVPPRMSSPYCGPYSLRNQPHPFPQNPLGMGFNRPHAFN

SEQ ID NO: 336 - protein, 62 aa, synthetic construct
NYATSLNTPVSYPPWTPSSATLPSLTSFVYSPHSTEAEISTPKTSPPPTSQMVEFPVLGTRM

SEQ ID NO: 337 - protein, 62 aa, synthetic construct
PGSSLFSSLSSAMKQAPQATSGLMEPPGPSTPIVQRPRILLVIDDAHTDWSKYFHGKKVNGE

SEQ ID NO: 338 - protein, 62 aa, synthetic construct
SGMQTKRPDLLRSEGIPTTEVAPTASPLSGSPKMSTSSSKSRYRSKPRHRRGNSRGSHSDFA

SEQ ID NO: 339 - protein, 62 aa, synthetic construct
PGSHGLPGRDGRDGVKGDPGPPGPMGPPGETPCPPGNNGLPGAPGVPGERGEKGEAGERGPP

SEQ ID NO: 340 - protein, 62 aa, synthetic construct
SSEKDGLSEVDTVAADPSALEEDREEPEGATPGTAHPGHSGGHFPSLANGAAQDGDTHPSTG

SEQ ID NO: 341 - protein, 62 aa, synthetic construct
ITPSSGTSTPPAIAATPVSAIPAALGVNGYSPVPTQPTGQPAPDALYPNGVHPYPAQSPAAP

SEQ ID NO: 342 - protein, 62 aa, synthetic construct
AAVLLAVYYGLIWVPTRSPAAPAGPQPSAPSPPCAARPGVPPVPAPAAASLSCLLGVPGGPR

SEQ ID NO: 343 - protein, 62 aa, synthetic construct
KDDWAAAYGPGPAAPAASPASLAFGPPPDFSPVPAPPGPGPGLLAQPLGGPGTPSSPGAQRP

SEQ ID NO: 344 - protein, 62 aa, synthetic construct
SRSHSQGEGSERSQRMPLPGDSGCHNPLSESPQGTAPLGSSGCHSQEEGTEGPQGMDPLGNR

SEQ ID NO: 345 - protein, 62 aa, synthetic construct
FLQCWTRLRLQTLPPVPLAQKYFELFPQERSPLWQNPCDDKRHKDIWSKEKTCDRLPKFLIV

SEQ ID NO: 346 - protein, 62 aa, synthetic construct
DPLGDVCKPVPAKAHQPHGKCMQDPSPASLSPPAPPAPLASTLSPGPMTFSEPFGPHSTLSA

SEQ ID NO: 347 - protein, 62 aa, synthetic construct
LAPQVATSYTPSSTTHIAQGAPHPPSRMHNSPTQNLPVPHCPPHNAHSPPRTSSSPASVNDS

SEQ ID NO: 348 - protein, 62 aa, synthetic construct
SARPAVGVGDTGMEDANAVRGSASQGPLIESPADDSPPHHAPPALATPSPEEGEIQYASLSF

SEQ ID NO: 349 - protein, 62 aa, synthetic construct
VGVGDTGMEDANAVRGSASQGPLIESPADDSPPHHAPPALATPSPEEGEIQYASLSFHKARP

SEQ ID NO: 350 - protein, 62 aa, synthetic construct
SVEESGLGLGLGPGRSPHLRRLSRAGPRLLSPDAEELPAAPPPSAVPLEPSEHEWLVRTAGG

SEQ ID NO: 351 - protein, 62 aa, synthetic construct
VGSVKMQPPCESPALAAAAAVVAADGPLRRSPSAREPEREQPPASLRPRLRDLPALLRSGLT

SEQ ID NO: 352 - protein, 62 aa, synthetic construct
RVFREAQKQVKKIDSCERRFLGGPARPPSPSPSPVPAPAPPPGPPRPAAAAATAPLANGRAG

SEQ ID NO: 353 - protein, 62 aa, synthetic construct
ATGAASDPAPPGRPQEMGPKLQARETPSLPTPIPLQPKEEPKEAPAPEPQPGSQAQTSSLPP

SEQ ID NO: 354 - protein, 62 aa, synthetic construct
DRTVQRARSPPFECRIPSEVPSRAVRPRSPSPPRQTPNGAVRGPRCPSPQNLSPWDRTTRRV

SEQ ID NO: 355 - protein, 62 aa, synthetic construct
RARSPPFECRIPSEVPSRAVRPRSPSPPRQTPNGAVRGPRCPSPQNLSPWDRTTRRVSSPLF

SEQ ID NO: 356 - protein, 62 aa, synthetic construct
QAPLPREPLALAGRTAPAQPRAASAPPTDRSPQSPSQGARRQPGAAPLGKVLVDPESGRYYF

SEQ ID NO: 357 - protein, 62 aa, synthetic construct
LADLFSPSPLRDPLPPQPVSPLDSKFPIDHSPPQQLPFPLLPPHHIERVESSLQPEASLSLN

SEQ ID NO: 358 - protein, 62 aa, synthetic construct
RSLSPILPGRHSPAPPPDPGFPAPSPPPADSPSEGFSLKAGGTALLPGPPAPSPLPATPLSA

SEQ ID NO: 359 - protein, 62 aa, synthetic construct
SLQEPNNDNLEPSQNQPQQQMPLTPFSPHNTPGIFLAPGAGLLEGAPEGIQEVRNMGPRNTS

SEQ ID NO: 360 - protein, 62 aa, synthetic construct
EYAWVPPGLRPEQIQLYFACLPEEKVPYVNSPGEKHRIKQLLYQLPPHDNEVRYCQSLSEEE

SEQ ID NO: 361 - protein, 62 aa, synthetic construct
TASFPGRTSHIPVQQPEKRKQKPSPEPSQDSPHSDKWPPGHPVKNLPQMRGPRPRPAGDSPR

SEQ ID NO: 362 - protein, 62 aa, synthetic construct
QVDDCPESCCELPCGTPSCCAPAPCLTLVCTPVSCVSSPCCQAACEPSACQSGCTSSCTPSC

SEQ ID NO: 363 - protein, 62 aa, synthetic construct
CQSAYSQLAGLRAHQKSARHRPPSTALQAHSPALPAPHAHAPALAAAAAAAAAAAAHHLPAM

SEQ ID NO: 364 - protein, 62 aa, synthetic construct
ELRGEDKAATSDSELNEPLLAPVESNDSEDTPSKLFGARGNPALSDPGTPDQHQASQTHPPF

SEQ ID NO: 365 - protein, 62 aa, synthetic construct
QQQQPPPSTNQHPQPAPQAPSQSQQQPLQPTPPQQPPPASQQPPAPTSQLQQAPQPQQHQPH

SEQ ID NO: 366 - protein, 62 aa, synthetic construct
QQHQPHSHSQNQNQPSPTQQSSSPPQKPSQSPGHGLPSPLTPPNPLQLVNNPLASQAAAAAA

SEQ ID NO: 367 - protein, 62 aa, synthetic construct
NQNQPSPTQQSSSPPQKPSQSPGHGLPSPLTPPNPLQLVNNPLASQAAAAAAAMSSIASSQA

SEQ ID NO: 368 - protein, 62 aa, synthetic construct
KIKSASYNLSLTLQKSKRPIPISTTAPPVQTPLPVIPHQKDPALDTNGSLVAPSPSPEARAS

SEQ ID NO: 369 - protein, 62 aa, synthetic construct
AAPAPKPRVVTTASIRPSVYQPVPASTYSPSPGANYSPTPYTPSPAPAYTPSPAPAYTPSPV

SEQ ID NO: 370 - protein, 62 aa, synthetic construct
VVTTASIRPSVYQPVPASTYSPSPGANYSPTPYTPSPAPAYTPSPAPAYTPSPVPTYTPSPA

SEQ ID NO: 371 - protein, 62 aa, synthetic construct
SIRPSVYQPVPASTYSPSPGANYSPTPYTPSPAPAYTPSPAPAYTPSPVPTYTPSPAPAYTP

SEQ ID NO: 372 - protein, 62 aa, synthetic construct
PVPASTYSPSPGANYSPTPYTPSPAPAYTPSPAPAYTPSPVPTYTPSPAPAYTPSPAPNYNP

SEQ ID NO: 373 - protein, 62 aa, synthetic construct
SDIPPLLPLPPSSSLAPDSPHSIISEPAEQSPKVLLVPQTAPADPSLGQNIANPLIPFSDEM

SEQ ID NO: 374 - protein, 62 aa, synthetic construct
MDIQVPTRAPDAVYTELQPTSPTPTWPADETPQPQTQTQQLEGTDGPLVTDPETHKSTKAAH

SEQ ID NO: 375 - protein, 62 aa, synthetic construct
CTSEGSAHRKWCATTHNYDRDRAWGYCVEATPPPGGPAALDPCASGPCLNGGSCSNTQDPQS

SEQ ID NO: 376 - protein, 62 aa, synthetic construct
KPMPQGHASYILEAPASNDLALVPIASETTSPGPRLPQGFLPPAQTPSYGDLDDCSPKHRNS

SEQ ID NO: 377 - protein, 62 aa, synthetic construct
ASNDLALVPIASETTSPGPRLPQGFLPPAQTPSYGDLDDCSPKHRNSSPRMPHLAVATDKTL

SEQ ID NO: 378 - protein, 62 aa, synthetic construct
ASETTSPGPRLPQGFLPPAQTPSYGDLDDCSPKHRNSSPRMPHLAVATDKTLAPSSEQEQPE

SEQ ID NO: 379 - protein, 62 aa, synthetic construct
GCGKKCNGHGVCNNNQNCHCLPGWAPPFCNTPGHGGSIDSGPMPPESVGPVVAGVLVAILVL

SEQ ID NO: 380 - protein, 62 aa, synthetic construct
PFRVSQNSGTGHANPTFKLQTPQGKRKVINTPEILRKPSQPPPRPPPDYLRGGSPPAPLPAH

SEQ ID NO: 381 - protein, 62 aa, synthetic construct
KKSPATIFLTVPGPHSPGPIKSPRPMKCPASPFAWPPKRLAPSMSSLNSLASSCFDLADISL

SEQ ID NO: 382 - protein, 62 aa, synthetic construct
RSGRGRKGPLVKQTKVEGEPQKGGGLPPAPSPTSPASPQPPPAVAAPSEKNSIPIPTIIIKA

SEQ ID NO: 383 - protein, 62 aa, synthetic construct
RGRKGPLVKQTKVEGEPQKGGGLPPAPSPTSPASPQPPPAVAAPSEKNSIPIPTIIIKAPST

SEQ ID NO: 384 - protein, 62 aa, synthetic construct
PTQPEPTGGGGGGGSSPSPAPAMSPVPPSPSPVPTPASPSGPATLDFTSQFGAALVGAARRE

SEQ ID NO: 385 - protein, 62 aa, synthetic construct
PVTSGRGPPSEDGPGVPPPSPRRSVPPSPTSPRASEENGLPLLVLPPPAPSVDVEDGEFLFV

SEQ ID NO: 386 - protein, 62 aa, synthetic construct
PSVDVEDGEFLFVEPLPPPLEFSNSFEKPESPLTPGPPHPLPDTPAPATPLPPVPPPAVAAA

SEQ ID NO: 387 - protein, 62 aa, synthetic construct
DVEDGEFLFVEPLPPPLEFSNSFEKPESPLTPGPPHPLPDTPAPATPLPPVPPPAVAAAPPT

SEQ ID NO: 388 - protein, 62 aa, synthetic construct
EPLPPPLEFSNSFEKPESPLTPGPPHPLPDTPAPATPLPPVPPPAVAAAPPTLDSTASSLTS

SEQ ID NO: 389 - protein, 62 aa, synthetic construct
PLEFSNSFEKPESPLTPGPPHPLPDTPAPATPLPPVPPPAVAAAPPTLDSTASSLTSYDSEV

SEQ ID NO: 390 - protein, 62 aa, synthetic construct
VSELTERLKVLEAKMTMLTVIEQPVPPTPATPEDPAPLWGPPPAQGSPGDGGLQDQVGAWGL

SEQ ID NO: 391 - protein, 62 aa, synthetic construct
ELHIFPASPGASLGGPEGAHPAAAPAGCVPSPSALAPGYAEPLKGVPPEKFNHTAISKGYRC

SEQ ID NO: 392 - protein, 62 aa, synthetic construct
PTVAGQFPPAAFMPTQTVMPLPAAMFQGPLTPLATVPGTSDSTRSSPQTDKPRQKMGKETFK

SEQ ID NO: 393 - protein, 62 aa, synthetic construct
QTVMPLPAAMFQGPLTPLATVPGTSDSTRSSPQTDKPRQKMGKETFKDFQMAQPPPVPSRKP

SEQ ID NO: 394 - protein, 62 aa, synthetic construct
YFNKVGVAQDTDDCDDFDISQLNLTPVTSTTPSTNSPPTPAPRQSSPSKSSASHASDPTTDD

SEQ ID NO: 395 - protein, 62 aa, synthetic construct
GVAQDTDDCDDFDISQLNLTPVTSTTPSTNSPPTPAPRQSSPSKSSASHASDPTTDDIFEEG

SEQ ID NO: 396 - protein, 62 aa, synthetic construct
DFDISQLNLTPVTSTTPSTNSPPTPAPRQSSPSKSSASHASDPTTDDIFEEGFESPSKSEEQ

SEQ ID NO: 397 - protein, 62 aa, synthetic construct
SAVKPDRAATPHHRPQPRSVPGWDSAPGAPSPADITHPTPAPGPSAHAAPSTTSALTPGPAA

SEQ ID NO: 398 - protein, 62 aa, synthetic construct
PSFPLSPTLHQQLSLPPHAQGALLSPPVSMSPAPQPPVLPTPMALQVQLAMSPSPPGPQDFP

SEQ ID NO: 399 - protein, 62 aa, synthetic construct
QQLSLPPHAQGALLSPPVSMSPAPQPPVLPTPMALQVQLAMSPSPPGPQDFPHISEFPSSSG

SEQ ID NO: 400 - protein, 62 aa, synthetic construct
GLLKPHPSRGLLHGNTMEKLIKKRNVPQKLSPHSKRPDILKTESLLPKLDAALSGVGLPGCP

SEQ ID NO: 401 - protein, 62 aa, synthetic construct
EILGPVIQFLGVPYAAPPTGERRFQPPEPPSPWSDIRNATQFAPVCPQNIIDGRLPEVMLPV

SEQ ID NO: 402 - protein, 62 aa, synthetic construct
SSPAAPAASSAPPMFKPIFTAPPKSEKEGPTPPGPSVTATAPSSSSLPTTTSTTAPTFQPVF

SEQ ID NO: 403 - protein, 62 aa, synthetic construct; identical to SEQ ID NO: 255

SEQ ID NO: 404 - protein, 62 aa, synthetic construct
LGPMFLPCVLVPNTRDCRPLTYQAAIPELRTPEELNPIIVTPPIQAIDQDRNIQPPSDRPGI

SEQ ID NO: 405 - protein, 62 aa, synthetic construct
VPNTRDCRPLTYQAAIPELRTPEELNPIIVTPPIQAIDQDRNIQPPSDRPGILYSILVGTPE

SEQ ID NO: 406 - protein, 62 aa, synthetic construct
PISPPSPPPAPAPLAPPPDISPFSLFCPPPSPPSIPLPLPPPTFFPLSVSTSGPPTPPLLPP

SEQ ID NO: 407 - protein, 62 aa, synthetic construct
PCIIPGSYGPSGFPGTPGFPGPKGSRGLPGTPGQPGSSGSKGEPGSPGLVHLPELPGFPGPR

SEQ ID NO: 408 - protein, 62 aa, synthetic construct
SDSSSMMSPTLASGDFPFSPCDISPFGPCLSPPLDPRALQSPPLRPPDVPPPEQYWKEVADQ

SEQ ID NO: 409 - protein, 62 aa, synthetic construct
LASGDFPFSPCDISPFGPCLSPPLDPRALQSPPLRPPDVPPPEQYWKEVADQNQRALGDALV

SEQ ID NO: 410 - protein, 62 aa, synthetic construct
PPYGTMDSSHVFHVKPPPHAYSAALEPFFESPLTDCTSPSFDGPLSPPLSINGNFSFKHEPS

SEQ ID NO: 411 - protein, 62 aa, synthetic construct; identical to SEQ ID NO: 138

SEQ ID NO: 412 - protein, 62 aa, synthetic construct
LSSCNYAPEDTGMSVYPEPWGPPVTVTRAASPSGPPPMKIAGDCRAIRPTVAIPHEPVSSRT

SEQ ID NO: 413 - protein, 62 aa, synthetic construct
PSPLPPGQGVLTGLRAPRTRLARGSGPREKTPASLEPKPLASPIRDRPAAAKKPALPFSQSA

SEQ ID NO: 414 - protein, 62 aa, synthetic construct
GSKGERGRPGKDAMGTPGSPGCAGSPGLPGSPGPPGPPGDIVFRKGPPGDHGLPGYLGSPGI

SEQ ID NO: 415 - protein, 62 aa, synthetic construct
GEPGLQGTQGVPGAPGPPGEAGPRGELSVSTPVPGPPGPPGPPGHPGPQGPPGIPGSLGKCG

SEQ ID NO: 416 - protein, 62 aa, synthetic construct
PHGDLGFKGIKGLLGPPGIRGPPGLPGFPGSPGPMGIRGDQGRDGIPGPAGEKGETGLLRAP

SEQ ID NO: 417 - protein, 62 aa, synthetic construct
DKGSMGHPGPKGPPGTAGDMGPPGRLGAPGTPGLPGPRGDPGFQGFPGVKGEKGNPGFLGSI

SEQ ID NO: 418 - protein, 62 aa, synthetic construct
GRRAPPPSPCPTPRSGPSPCLPTPDPPPEPSPTGWGPPDGGRAALVRRAPQPPGRPPTPGPP

SEQ ID NO: 419 - protein, 62 aa, synthetic construct
DPGTGASSGTRTPDVKAFLESPWSLDPASASPEPVPHILASSRQWDPASCTSLGTDKCEALL

SEQ ID NO: 420 - protein, 62 aa, synthetic construct
QPAAEELGFHRCFQEPPSSFTSTNYTSPSATPRPPAPGPPQSRGTSPLQPGSYPEYQASGAD

SEQ ID NO: 421 - protein, 62 aa, synthetic construct
QGGSQGALGTAGKTPGPREKLPAVRSSQGGSPALFTYNGMTDPGAQPLFFGVAQPQVSPHGT

SEQ ID NO: 422 - protein, 62 aa, synthetic construct
GDLAACAPSPTSAAHMPCSLGPLPREDPLTSPSRAQGGLGGQLPASPSCRDPPGPQQLLACS

SEQ ID NO: 423 - protein, 62 aa, synthetic construct
PGPARSESVGSFGRAPSAPDKPPRTPRKQATPSRVLPTKPKPNSQNKPRPPPSEQRKAEPGH

SEQ ID NO: 424 - protein, 62 aa, synthetic construct
VTRSTSRAVTVAARPMTTTAFPTTQRPWTPSPSHRPPTTTEVITARRPSVSENLYPPSRKDQ

SEQ ID NO: 425 - protein, 62 aa, synthetic construct
YAQREDFEAAGSPFSGGPVSFPPAPGPHFGTPGYGSPHFTALYSSVPFPEGEVFPPVSVITL

SEQ ID NO: 426 - protein, 62 aa, synthetic construct
DFEAAGSPFSGGPVSFPPAPGPHFGTPGYGSPHFTALYSSVPFPEGEVFPPVSVITLGSPMH

SEQ ID NO: 427 - protein, 62 aa, synthetic construct
GRKGESGIGAKGEKGIPGFPGPRGDPGSYGSPGFPGLKGELGLVGDPGLFGLIGPKGDPGNR

SEQ ID NO: 428 - protein, 62 aa, synthetic construct
KCNRAPIYVRVPFLEVNDPGEPSGLETLKDTPPPRLIKSHLPLALLPQTLLDQKVKVVYVAR

SEQ ID NO: 429 - protein, 62 aa, synthetic construct; identical to SEQ ID NO: 428

SEQ ID NO: 430 - protein, 62 aa, synthetic construct
GPPDPSAGPATSPPLSTTTTARPTPLTSTASPAATTPLRRAPLTTHPVGAINQLGPDLPPAT

SEQ ID NO: 431 - protein, 62 aa, synthetic construct
SAGPATSPPLSTTTTARPTPLTSTASPAATTPLRRAPLTTHPVGAINQLGPDLPPATAPVPS

SEQ ID NO: 432 - protein, 62 aa, synthetic construct
ASGPAGVRGPNGDAGRPGEPGLMGPRGLPGSPGNIGPAGKEGPVGLPGIDGRPGPIGPAGAR

SEQ ID NO: 433 - protein, 62 aa, synthetic construct
CLIKKEPPAGDLAPALAEDGPPTVAPGPVQSPLPLSPLAGRPGKPGAGPAQVPRELSLTPIT

SEQ ID NO: 434 - protein, 62 aa, synthetic construct
EPPAGDLAPALAEDGPPTVAPGPVQSPLPLSPLAGRPGKPGAGPAQVPRELSLTPITGAKPS

SEQ ID NO: 435 - protein, 62 aa, synthetic construct
DHIQNNSDSGAKKPTPPDYYPECQSQPAVSSPHHIIPQKQHYAPPPSPSSPVNHQMPYPPQD

SEQ ID NO: 436 - protein, 62 aa, synthetic construct
SAVGPTCPATVSSLVKPGLNCPSIPKPTLPSPGQILNGKGLPAPPTLEKKPEDNSNNRKFLN

SEQ ID NO: 437 - protein, 62 aa, synthetic construct
KPHTPSLPRPPGCPAQQGGSAPIDPPPVHESPHPPLPATEPASRLSSEEGEGDDKEESVEKL

SEQ ID NO: 438 - protein, 62 aa, synthetic construct
MAVRELNMNLLSCPTTTPGLPLFTPAPSTASPTTQPPTLSIPNPSRSYTPPTPTTSKLPTIP

SEQ ID NO: 439 - protein, 62 aa, synthetic construct
VRRLQEEDQQFRTSSLPAIPNPFPELCGPGSPPVLTPGSLPPSQAAAKQDVKVFSEDGTSKV

SEQ ID NO: 440 - protein, 62 aa, synthetic construct
EEDQQFRTSSLPAIPNPFPELCGPGSPPVLTPGSLPPSQAAAKQDVKVFSEDGTSKVVEILA

SEQ ID NO: 441 - protein, 62 aa, synthetic construct
CTSWDDIQCVEEFGANATVETPAAEETMNTSPGTPAPAAEETMNTSPGTPAPAAEETMTTSP

SEQ ID NO: 442 - protein, 62 aa, synthetic construct
NATVETPAAEETMNTSPGTPAPAAEETMNTSPGTPAPAAEETMTTSPGTPAPAAEETMTTSP

SEQ ID NO: 443 - protein, 62 aa, synthetic construct
SPGTPAPAAEETMNTSPGTPAPAAEETMTTSPGTPAPAAEETMTTSPGTPAPAAEETMITSP

SEQ ID NO: 444 - protein, 62 aa, synthetic construct
SPGTPAPAAEETMTTSPGTPAPAAEETMTTSPGTPAPAAEETMITSPGTPASSHYLSCTIVG

SEQ ID NO: 445 - protein, 62 aa, synthetic construct
SGKPVARSKTMPPQVPPRTYASRYGNRKNATPGKNRRISAAPVGSRPHTVANGHELFEVSEE

SEQ ID NO: 446 - protein, 62 aa, synthetic construct
AGKQQQQLPQTLQPQPPQPQPDPPPVPPGPTPVPTGLLEPEPGGSEDCDVLEATQPLEQGFL

SEQ ID NO: 447 - protein, 62 aa, synthetic construct
SVLQPSPQVPATTVAHTATQQPAAPAPPAVSPREALMEAMHTVPVPPTTVRTDSLGKDAPAG

SEQ ID NO: 448 - protein, 62 aa, synthetic construct
RYYGPIEPQGLGLGLGEARAAPRGAAGRPLSPPAAQPPQKPPPSYFAIVRDKEPAEPPAGAF

SEQ ID NO: 449 - protein, 62 aa, synthetic construct
LLAGLRSKAAPSAPLPLGCGFPDMAHPSETSPLKGASENSKRDRLNPEFPGTPYPEPSKLPH

SEQ ID NO: 450 - protein, 62 aa, synthetic construct
NHRWKYVNGEWVPGGKPEPQAPSCVYIHPDSPNFGAHWMKAPVSFSKVKLTNKLNGGGQIML

SEQ ID NO: 451 - protein, 62 aa, synthetic construct
GTACAGTQPGAQPGAQPGASPSPSQPPADQSPHTLRKVSKKLAPIPPKVPFGQPGAMADQSA

SEQ ID NO: 452 - protein, 62 aa, synthetic construct
VRNALAGGLRPQAVRPSAPRGPPGTTPVAASPSRASSSPGRGGSSEPGSPRSAYSSDDSGCE

SEQ ID NO: 453 - protein, 62 aa, synthetic construct
AIARQRERLPELTRPQPCPLPRATSLPSLDTPGELREMPPGPEPPTSRKMHLAEPGPQSLPL

SEQ ID NO: 454 - protein, 62 aa, synthetic construct
VFDRRVPSIRSGDFQAPFQTSAAMHHPSQESPTLPESSATDSDYYSPTGGAPHGYCSPTSAS

SEQ ID NO: 455 - protein, 62 aa, synthetic construct
SLAHAGVALAKPLPRTPEQESCTIPVQEDESPLGAPYVRNTPQFTKPLKEPGLGQLCFKQLG

SEQ ID NO: 456 - protein, 62 aa, synthetic construct
LAQQGHYDSYKQHQPTPQPALPYNHIYSYPSPITAAAAKVPTPPGVPAIPGSVAMPRTWPSS

SEQ ID NO: 457 - protein, 62 aa, synthetic construct
DSQTSPDSPSSTPTPSPVSRRSASPEPAPRSPVPPPKPSGSPCTPLLPMAGVLAQNGSASAP

SEQ ID NO: 458 - protein, 62 aa, synthetic construct
TKPAGKDLHVKYNCDIPGAAEPVARRHQSLSPNHPPPQLGQSVGSQNDAYDVPRGVQFLEPP

SEQ ID NO: 459 - protein, 62 aa, synthetic construct
NTSSSVATLAPVNSPAPQDTTAAPPTPSATTPAPPSSSAPPETTAAPPTPSATTQAPPSSSA

SEQ ID NO: 460 - protein, 62 aa, synthetic construct
ETTAAPPTPSATTQAPPSSSAPPETTAAPPTPPATTPAPPSSSAPPETTAAPPTPSATTPAP

SEQ ID NO: 461 - protein, 62 aa, synthetic construct
PPTPSATTQAPPSSSAPPETTAAPPTPPATTPAPPSSSAPPETTAAPPTPSATTPAPLSSSA

SEQ ID NO: 462 - protein, 62 aa, synthetic construct
ETTAAPPTPPATTPAPPSSSAPPETTAAPPTPSATTPAPLSSSAPPETTAVPPTPSATTLDP

SEQ ID NO: 463 - protein, 62 aa, synthetic construct
PPTPPATTPAPPSSSAPPETTAAPPTPSATTPAPLSSSAPPETTAVPPTPSATTLDPSSASA

SEQ ID NO: 464 - protein, 62 aa, synthetic construct
PPTPSATTLDPSSASAPPETTAAPPTPSATTPAPPSSPAPQETTAAPITTPNSSPTTLAPDT

SEQ ID NO: 465 - protein, 62 aa, synthetic construct
KLYFAQVQTPETDGDKLHLAPPQPAKQFLISPPSSPPVGWQPINDATPVLNYDLLYAVAKLG

SEQ ID NO: 466 - protein, 62 aa, synthetic construct
HLHHHYCGLHERRVFHLTVAEPHAEPPPRGSPGNGSSHSGAPGPDPTLARGHNVINVIVPES

SEQ ID NO: 467 - protein, 62 aa, synthetic construct; identical to SEQ ID NO: 127

SEQ ID NO: 468 - protein, 62 aa, synthetic construct; identical to SEQ ID NO: 128

SEQ ID NO: 469 - protein, 62 aa, synthetic construct
MPEPTKKEENEVPAPAPPPEEPSKEKEAGTTPAKDWTLVETPPGEEQAKQNANSQLSILFIE

SEQ ID NO: 470 - protein, 62 aa, synthetic construct
DVPGLPQSILHPQDVAYLQDMPRSPGDVPQSPSDVSPSPDAPQSPGGMPHLPGDVLHSPGDM

SEQ ID NO: 471 - protein, 62 aa, synthetic construct
PQSILHPQDVAYLQDMPRSPGDVPQSPSDVSPSPDAPQSPGGMPHLPGDVLHSPGDMPHSSG

SEQ ID NO: 472 - protein, 62 aa, synthetic construct
GDRPDFTQNDVQNRDMPMDISALSSPSCSPSPQSETPLEKVPWLSVMETPARKEISLSEPAK

SEQ ID NO: 473 - protein, 62 aa, synthetic construct
FFPVHFQEFNPALSPQRSPPGPPGAGPDPPSPPGADPSRGAPIGGRFDRQASAEGCFYNADY

SEQ ID NO: 474 - protein, 62 aa, synthetic construct
GCLPVPLFNQKKRNRQPLTSNPLKDDSGISTPSDNYDFPPLPTDWAWEAVNPELAPVMKTVD

SEQ ID NO: 475 - protein, 62 aa, synthetic construct
QNPSPGAYILPSYPVSSPRTSPKHTSPLIISPKKSQDNSVNFSNSWPLKSFEGLSKPSPQKK

SEQ ID NO: 476 - protein, 62 aa, synthetic construct
QNKEECGKGPKRIFAPPAQKSYSLLPCSPNSPKEETPGISSPETEARISLPKASLKKKEEKA

SEQ ID NO: 477 - protein, 62 aa, synthetic construct
TGGSMTITGNIYIYNGPVLGGPPGPGDLPATPEPPYPIPEEGDPGPPGLSTPHQEDGKAWHL

SEQ ID NO: 478 - protein, 62 aa, synthetic construct
PPPCCCSIPQPCRGSGPKDLDLPPGSPGRCTPKSSEPAPATLTGVPRRTAKKAESLSNSSHS

SEQ ID NO: 479 - protein, 62 aa, synthetic construct
TSGRRWREISASLLYQALPSSPDHESPSQESPNAPTSTAVLGSWGSPPQPSLAPREQEAPGT

SEQ ID NO: 480 - protein, 62 aa, synthetic construct
VYLAAVNRLYQLSGANLSLEAEAAVGPVPDSPLCHAPQLPQASCEHPRRLTDNYNKILQLDP

SEQ ID NO: 481 - protein, 62 aa, synthetic construct
LSAQWPCFWCSQQHSCVSNQSRCEASPNPTSPQDCPRTLLSPLAPVPTGGSQNILVPLANTA

SEQ ID NO: 482 - protein, 62 aa, synthetic construct
SQQHSCVSNQSRCEASPNPTSPQDCPRTLLSPLAPVPTGGSQNILVPLANTAFFQGAALECS

SEQ ID NO: 483 - protein, 62 aa, synthetic construct
LSVVSDDQSLFDSAYGAAAHLPKADMTASGSPDYGQPHKINPLPPQQEWINQPVRVNVKREY

SEQ ID NO: 484 - protein, 62 aa, synthetic construct
GPPGRGLTGPTGAVGLPGPPGPSGLVGPQGSPGLPGQVGETGKPGAPGRDGASGKDGDRGSP

SEQ ID NO: 485 - protein, 62 aa, synthetic construct
GEPGDPGEDGQKGAPGPKGFKGDPGVGVPGSPGPPGPPGVKGDLGLPGLPGAPGVVGFPGQT

SEQ ID NO: 486 - protein, 62 aa, synthetic construct
LLGHKPSQHNPKLNKNPGPTLELQDGPGAPTPVLNQPGAPKTQIFMNGACSPSLLPTLSAPM

SEQ ID NO: 487 - protein, 62 aa, synthetic construct
GLTSPSVQPLSGSIIPPGFAELTSPYTALGTPVNAEPVEGHNASAFPNGTAKTSGFRIATGM

SEQ ID NO: 488 - protein, 62 aa, synthetic construct
AASPVSTYQVQSTSWMPHPPYVMQPTGAVITPTMDHPMSMQPANMMGPLTQQMNHLSLGTTG

SEQ ID NO: 489 - protein, 62 aa, synthetic construct
VPRSQGTEAELNARLQALTLTPPNAAGFQSSPSSMPLLDRSPAHSPPRTPTPGASDCHCLWE

SEQ ID NO: 490 - protein, 62 aa, synthetic construct
LNARLQALTLTPPNAAGFQSSPSSMPLLDRSPAHSPPRTPTPGASDCHCLWEHQTSIDSDMA

SEQ ID NO: 491 - protein, 62 aa, synthetic construct
SGGRSLGEEGPPTRGASPPTPPVSIKSERLSPAPGGPGDFPKTFPYPLLLARSLAEPLRPGP

SEQ ID NO: 492 - protein, 62 aa, synthetic construct
LAYYSKMQEAQECNASPSSSGSGSSSFSSQTPASIKEEEGSPEKERPPEAEYINSRCVLFTY

SEQ ID NO: 493 - protein, 62 aa, synthetic construct
RGSPKDERMSSHDGKCPFQSAAFTSRDQSNSPGIPNPRPSSPTPLNERGRQISPSTRTPGGQ

SEQ ID NO: 494 - protein, 62 aa, synthetic construct
RDSMPKLQIRAPEAQQTLFSINQSCLPGFYTPAELKPFWERPPQDPNAPGADGKAFQKSKWT

SEQ ID NO: 495 - protein, 62 aa, synthetic construct
TYGLTPHYIYPPAIVQPSVVIPAAPVPSLSSPYIEYTPASPAYAQYPPATYDQYPYAASPAT

SEQ ID NO: 496 - protein, 62 aa, synthetic construct
PGGRVKEGGLKGQKGEPGVPGPPGRAGPPGSPCLPGPPGLPCPVSPLGPAGPALQTVPGPQG

SEQ ID NO: 497 - protein, 62 aa, synthetic construct
CPVSPLGPAGPALQTVPGPQGPPGPPGRDGTPGRDGEPGDPGEDGKPGDTGPQGFPGTPGDV

SEQ ID NO: 498 - protein, 62 aa, synthetic construct
KGEPGDASLGFGMRGMPGPPGPPGPPGPPGTPVYDSNVFAESSRPGPPGLPGNQGPPGPKGA

SEQ ID NO: 499 - protein, 62 aa, synthetic construct
DSHYQGKIHAKRLKLLLGEKTPLKTTATPLSPLKPPRMDTAPVVASPYQRRDSDRYCGLCAA

SEQ ID NO: 500 - protein, 62 aa, synthetic construct
EPSCCSAVCTLPSSCQPVVCEPSCCQPVCPTPTCSVTSSCQAVCCDPSPCEPSCSESSICQP

SEQ ID NO: 501 - protein, 62 aa, synthetic construct
EPPSVPSTCQEPSCCVSSICQPICSEPSPCSPAVCVSSPCQPTCYVVKRCPSVCPEPVSCPS

SEQ ID NO: 502 - protein, 62 aa, synthetic construct
QPTCYVVKRCPSVCPEPVSCPSTSCRPLSCSPGSSASAICRPTCPRTFYIPSSSKRPCSATI

SEQ ID NO: 503 - protein, 62 aa, synthetic construct
APGPRREDPLGRGRSYENLLGREVREPRGVSPEGRRPPVVVNLSTSPRRYAALSLSETSLTE

SEQ ID NO: 504 - protein, 62 aa, synthetic construct
GLGPSSERPWPSPWPSGLASIPYEPLRFFYSPPPGPEVVASPLVPCPSTPRLASASHPEELC

SEQ ID NO: 505 - protein, 62 aa, synthetic construct
LLEPELPGSALRSLWSSLCLGPAPAPPGPVSPEGRLAAAWDALIVRPVRRWRRVAVGVNACV

SEQ ID NO: 506 - protein, 62 aa, synthetic construct
GDIGGNETVTLRQSFVPVRPGPRQLIASLDSPQLSQVHGVIQVDVAPAPGDGGFFSDAGGDS

SEQ ID NO: 507 - protein, 62 aa, synthetic construct
LVHHQALAVAGLSPLLQRSHSPASFPRPFATPPATPGSRGWPPQPVPTLRLEGVESSEKLNS

SEQ ID NO: 508 - protein, 62 aa, synthetic construct
AAPPTPVSPRLHVPLMPAQPAPPKPQPTTRTPPQSQTPGALPAKREQPPSLTRNGPLSCGQR

SEQ ID NO: 509 - protein, 62 aa, synthetic construct
VSPRLHVPLMPAQPAPPKPQPTTRTPPQSQTPGALPAKREQPPSLTRNGPLSCGQRLRKSLS

SEQ ID NO: 510 - protein, 62 aa, synthetic construct
KNQTALDALHAQTVSQTAASSPQDAYRSPHSPFYQLPPSVQRHSPNPLLVAPTPPALQKLLE

SEQ ID NO: 511 - protein, 62 aa, synthetic construct
FAEVRRPQDSAFFKGPPYPGYPFLMIPDLSSPYLSNGPLSPGGARTYLQMKWPLLDVPSSAT

SEQ ID NO: 512 - protein, 62 aa, synthetic construct
HFSPGSPPTHLSPEIDPKTGIPRPPHPSELSPYYPLSPGAVGQIPHPLGWLVPQQGQPMYSL

SEQ ID NO: 513 - protein, 62 aa, synthetic construct
PFLASPPPALGRYFSVDGGARGGPVGPCPPSPPPRRPRERSPGPVDTRSPASSGKAPPRGGL

SEQ ID NO: 514 - protein, 62 aa, synthetic construct
GRYFSVDGGARGGPVGPCPPSPPPRRPRERSPGPVDTRSPASSGKAPPRGGLTGATSPAWTR

SEQ ID NO: 515 - protein, 62 aa, synthetic construct
FEDPYSGGSSGSAALATPVAPGPTPPPRHGSPPHRLIRVETPGPPAPPADERISGPPASSDR

SEQ ID NO: 516 - protein, 62 aa, synthetic construct
GSAALATPVAPGPTPPPRHGSPPHRLIRVETPGPPAPPADERISGPPASSDRLAILEDYADP

SEQ ID NO: 517 - protein, 62 aa, synthetic construct
RSGAGGPLGGRGRPPRPLVVRAVRSRSWPASPRGPQPPRIRARSAPPMEGARVFGALGPIGP

SEQ ID NO: 518 - protein, 62 aa, synthetic construct
PAVNYAPLDLPGSAEPPKQCHPCPGVPQGTSPAPVPYGYFGGGYYSCRVSRSSLKPCAQAAT

SEQ ID NO: 519 - protein, 62 aa, synthetic construct
FRLDNLLNMAYGVKRLMSGPVPPSACPPRFSPITIDGMTSLVGMNIPGHTGTGWCIFVYNLS

SEQ ID NO: 520 - protein, 62 aa, synthetic construct
PAQPLASSTPLSLSGMPPVSFPAVHKPPSSTPGSSLPTPPPGLSPLSPQQQVQPSGSPARSL

SEQ ID NO: 521 - protein, 62 aa, synthetic construct
VLCACEAPQWGRRTRGPGRVSCKNIKPECPTPACGQPRQLPGHCCQTCPQERSSSERQPSGL

SEQ ID NO: 522 - protein, 62 aa, synthetic construct
AAPLVMLKMEPNGKLQPMVIQIQPPNPSSPTPTLFLPSDPPLAWLLAKSWVRNSDFQLHEIQ

SEQ ID NO: 523 - protein, 62 aa, synthetic construct
GEPGLPGPPGEGRAGEPGTAGPTGPPGVPGSPGITGPPGPPGPPGPPGAPGAFDETGIAGLH

SEQ ID NO: 524 - protein, 62 aa, synthetic construct; identical to SEQ ID NO: 101

SEQ ID NO: 525 - protein, 62 aa, synthetic construct
RNLGQNEPHMPLNATFPDSFQQPNSHPFPHSPNSSYPNSPGSSSSTYPHSPTSSDPGSPFQM

SEQ ID NO: 526 - protein, 62 aa, synthetic construct
QGNFLPLQCHGSTGFCWCVDPDGHEVPGTQTPPGSTPPHCGPSPEPTQRPPTICERWRENLL

SEQ ID NO: 527 - protein, 62 aa, synthetic construct
PLQCHGSTGFCWCVDPDGHEVPGTQTPPGSTPPHCGPSPEPTQRPPTICERWRENLLEHYGG

SEQ ID NO: 528 - protein, 62 aa, synthetic construct
SISQDENYHHLPYAQQQAIEEPRAFHPPNVSPRLLHPAAHPPQQNAVMVDIHDQLHQGTVPV

SEQ ID NO: 529 - protein, 62 aa, synthetic construct
HSPRRLCSALLQRDAPGLRRLPAPGLRRPLSPPAAVPRPASPRLLAAASAASGAARSCSRTV

SEQ ID NO: 530 - protein, 62 aa, synthetic construct
RPFTCTVCGKSFIRKDHLRKHQRNHAAGAKTPARGQPLPTPPAPPDPFKSPASKGPLASTDL

SEQ ID NO: 531 - protein, 62 aa, synthetic construct
KFPDLTVEDLETDALKADMNVHLLPMEELTSPLKDPPMSPDPESPSPQPSCQTEISDFSTDR

SEQ ID NO: 532 - protein, 62 aa, synthetic construct
KADMNVHLLPMEELTSPLKDPPMSPDPESPSPQPSCQTEISDFSTDRIDFFSALEKFVELSQ

SEQ ID NO: 533 - protein, 62 aa, synthetic construct
TFAPEADGTIFFPERRPSPFLKRAELPGSSSPLLAQPRKPSGDSQPSSPRYGYEPPLYEEPP

SEQ ID NO: 534 - protein, 62 aa, synthetic construct
NRMPPPRPDVGSKPDSIPPPVPSTPRPIQSSPHNRGSPPVPGGPRQPSPGPTPPPFPGNRGT

SEQ ID NO: 535 - protein, 62 aa, synthetic construct
PPPVPSTPRPIQSSPHNRGSPPVPGGPRQPSPGPTPPPFPGNRGTALGGGSIRQSPLSSSSP

SEQ ID NO: 536 - protein, 62 aa, synthetic construct
GGSSSSSSSSDNELAPFARAKSLPPSPVTHSPLLHPRGFLRPSASLPEEAEASERSTEAPAP

SEQ ID NO: 537 - protein, 62 aa, synthetic construct
NLSDLYDIKYLPFEFMIFRKVPKSAQPEPPSPMAEEELAEFPEPTWPWPGELGPHAGLEITE

SEQ ID NO: 538 - protein, 62 aa, synthetic construct
TATFPGEPGASPRLSPGPSTPPGAPTLPLASPGAPQPPPVTPERSFSASGAQIVSRWPPLPG

SEQ ID NO: 539 - protein, 62 aa, synthetic construct
GTLLTEASALSMMDPSPSKTPITLLGPRVLSPTTSRLSTALAATTHPGPQQPPVGASRGEES

SEQ ID NO: 540 - protein, 62 aa, synthetic construct
YGCKVETIKLNVEAVNTHRDKPTNNFPKNQTPVRMRRNSFTPLSSSNTIRRPRNYSVGSRPL

SEQ ID NO: 541 - protein, 62 aa, synthetic construct
NVEAVNTHRDKPTNNFPKNQTPVRMRRNSFTPLSSSNTIRRPRNYSVGSRPLKPLSPLRAQD

SEQ ID NO: 542 - protein, 62 aa, synthetic construct
MILSRAQLMPQGQMMVNPPSQNLGPSPQRMTPPKQMLSQQGPQMMAPHNQMMGPQGQVLLQQ

SEQ ID NO: 543 - protein, 62 aa, synthetic construct
DNEEPHGCFSLAERPSPPKAWDQLRAVSGGSPERRTPWKPPPSDLYGDLKSRRNSVASPTSP

SEQ ID NO: 544 - protein, 62 aa, synthetic construct
REVQGRAKDFDVLVAELKANSRKGESPKEKSPGRKEQVLERPSQELPSSVQVVAAVAAPSST

SEQ ID NO: 545 - protein, 62 aa, synthetic construct
FARPQMNTRFPSSRMVPFHFPPSKCALWNPTPTGDFIYLHLSYYRNPKLVVTEKTIRLAYRH

SEQ ID NO: 546 - protein, 62 aa, synthetic construct
KQEVLPLTLELEILENPPEEMKLECIPAPITPSTVPSFPPTPPTPPASPPHTPVIVPAAATT

SEQ ID NO: 547 - protein, 62 aa, synthetic construct
LEILENPPEEMKLECIPAPITPSTVPSFPPTPPTPPASPPHTPVIVPAAATTVSSPSAAITV

SEQ ID NO: 548 - protein, 62 aa, synthetic construct
RDTEQIFREGPVEIGLPCSIKNEARPPCLPTPGKREPQGISWESPLDEVDKMCHLPEPELNK

SEQ ID NO: 549 - protein, 62 aa, synthetic construct
KFPKKRGPKPGSKRKPRTLLNPPPASPTTSTPEPDTSTVPQDAATIPSSAMQAPTVCIYLNK

SEQ ID NO: 550 - protein, 62 aa, synthetic construct
CLVDEDSHSSAGTLPGPGASLPSSSGPGLTSPPYTATPIDHDYVKCKKPHQQATPDDRSQDS

SEQ ID NO: 551 - protein, 62 aa, synthetic construct
TSDCAYFILVDRYLSWFLPTEGSVPPPLSSSPGGTSPSPPPRTPAIPFASYGLHHTSLLKRH

SEQ ID NO: 552 - protein, 62 aa, synthetic construct
YFILVDRYLSWFLPTEGSVPPPLSSSPGGTSPSPPPRTPAIPFASYGLHHTSLLKRHISHQT

SEQ ID NO: 553 - protein, 62 aa, synthetic construct
GPLGAQADEAGCSAQPSPERQPSPLEPRPVSPSAYMLRLPPPAGAYIQNEHSYQVGSALLWK

SEQ ID NO: 554 - protein, 62 aa, synthetic construct
QSFLMNKNQVPKLQPQITMIPPSAQPPRTQTPPLGQTPQLGLKTNPPLIQEKPAKTSKKPPP

SEQ ID NO: 555 - protein, 62 aa, synthetic construct
GPDTAEPATAEAAVAPPDAGLPLPGLPAEGSPPPKTYVSCLKSLLSSPTKDSKPNISAHHIS

SEQ ID NO: 556 - protein, 62 aa, synthetic construct
GCPITKTKVILKVEQGQEPWMVEGANPHESSPESDYPLVDEPGKHRESKDNFLKSVLLTFNK

SEQ ID NO: 557 - protein, 62 aa, synthetic construct
PSVSSLDSALESSPSLHSPADPSHLSPPASSPRPSRGHRRSASCGSPLSGGAEEASGGTGYG

SEQ ID NO: 558 - protein, 62 aa, synthetic construct
TGATIISATGASALPLCPSPAPHSHLPREVSPKKHSTVHIVPQRRPASLRSRSDLPQAYPQT

SEQ ID NO: 559 - protein, 62 aa, synthetic construct
GPQRPGNLPDFHSSGASSHAVPAPCLPLDQSPNRAASFHGLPSSSGSDSHSLEPRRVTNQGA

SEQ ID NO: 560 - protein, 62 aa, synthetic construct
RCASWNGSMHNGALDNHLSPSAYPGLPGEFTPPVPDSFPSGPPLQHPAPDHQSLQQQQQQQQ

SEQ ID NO: 561 - protein, 62 aa, synthetic construct
PSAQPLGPPALQPGPGLSTKSPQPSPSSRKSPLSLSPAFQVPLGPAEQGSSPLLSPVLSDAG

SEQ ID NO: 562 - protein, 62 aa, synthetic construct
LGPPALQPGPGLSTKSPQPSPSSRKSPLSLSPAFQVPLGPAEQGSSPLLSPVLSDAGGAGMD

SEQ ID NO: 563 - protein, 62 aa, synthetic construct
EDQQMASHENPVDILIMDDDDVPSWPPTKLSPPQSAPPAGPPPRPRPPAPYICNECGKSFSH

SEQ ID NO: 564 - protein, 62 aa, synthetic construct
EPGPASGTESAHFLRAHSRCGPGLPPPHVSSPQPTPPGPEAKEPGLGVDFIRHNARAAKRAP

SEQ ID NO: 565 - protein, 62 aa, synthetic construct
TANSIIVLDDDDEDEAAAQPGPSHPLPNAASPGAEAPSSSEPHGARGSSSSGGKKCYKLENE

SEQ ID NO: 566 - protein, 62 aa, synthetic construct
YNIAVTSSVGLTSPSSRSQVTPQNQQMDSASPLSISPANSTQSPPMPIYNSTHVASVVNQSV

SEQ ID NO: 567 - protein, 62 aa, synthetic construct
TSSVGLTSPSSRSQVTPQNQQMDSASPLSISPANSTQSPPMPIYNSTHVASVVNQSVEQMCN

SEQ ID NO: 568 - protein, 62 aa, synthetic construct
EVSDLRSKSFDCGSITPPQTTPLTELQPPSSPSRVGVTGHVPLLERRRGPLVRQISLNIAPD

SEQ ID NO: 569 - protein, 62 aa, synthetic construct
RQRGGESDFLPVSSAKPPAAPGCAGEPLLSTPGPGKGIPVGGERMEPEEEDELGSGRDVDSN

SEQ ID NO: 570 - protein, 62 aa, synthetic construct
ATRPSPSPERSSTGPEPPAPTPLLAERHGGSPQPLATTPLSQEPVNPPSEASPTRDRSPPKS

SEQ ID NO: 571 - protein, 62 aa, synthetic construct
RSLLERWTRMARPAAPALTSVPAPAPAPTPTPTPVQPTSPPPGPVAQPTGPQPQSAGSTSGP

SEQ ID NO: 572 - protein, 62 aa, synthetic construct
LQNSLWASPGSGSPGGPCLVSPEGIPSPCMSPYSHPHGSVAGFMGVPAPSAAHPGIYSIHGF

SEQ ID NO: 573 - protein, 62 aa, synthetic construct
QLPSTSLQFIGSPYSLPYAVPPNFLPSPLLSPSANLATSHLPHFVPYASLLAEGATPPPQAP

SEQ ID NO: 574 - protein, 62 aa, synthetic construct
PSPLLSPSANLATSHLPHFVPYASLLAEGATPPPQAPSPAHSFNKAPSATSPSGQLPHHSST

SEQ ID NO: 575 - protein, 62 aa, synthetic construct
PYASLLAEGATPPPQAPSPAHSFNKAPSATSPSGQLPHHSSTQPLDLAPGRMPIYYQMSRLP

SEQ ID NO: 576 - protein, 62 aa, synthetic construct
IRPVDFKQRNKADKGVSLSKDPSCQTQISDSPADASPPTGLPDAEDSEVSSQKPIEEKAVTP

SEQ ID NO: 577 - protein, 62 aa, synthetic construct
FKQRNKADKGVSLSKDPSCQTQISDSPADASPPTGLPDAEDSEVSSQKPIEEKAVTPSPEQV

SEQ ID NO: 578 - protein, 62 aa, synthetic construct
DLKVEELTALGNLGDMPVDFCTTRVSPAHRSPTVLCQKVCEENSVSPIGCNSSDPADFEPIP

SEQ ID NO: 579 - protein, 62 aa, synthetic construct
DPEIQDGSPTTSRRPSGTGTGPEDGRPSLGSPYGQPPRFPVPHNGSSEATLPAQMSTLHVSP

SEQ ID NO: 580 - protein, 62 aa, synthetic construct
VAVTAPRKGRSVEKENVAVESEKNLGPSRRSPGTPRPPGASKGGRTPPQQGGRAGMGRASRS

SEQ ID NO: 581 - protein, 62 aa, synthetic construct
AAPRAYSDHDDRWETKEGAASPAPETPQPTSPETSPKETPMQPPEIPAPAHRPPEDEGEENE

SEQ ID NO: 582 - protein, 62 aa, synthetic construct
VEAGKENMKFETGAFSYYGTMALTSVPSDRSPAHPTPLSRSASLSYPDRTDVSTAATLAGSS

SEQ ID NO: 583 - protein, 62 aa, synthetic construct
ENMKFETGAFSYYGTMALTSVPSDRSPAHPTPLSRSASLSYPDRTDVSTAATLAGSSNQFGS

SEQ ID NO: 584 - protein, 62 aa, synthetic construct
YVSSADLVFTPNSGASSVSLVPSLGLPSDQTPSLCPGLASGPPGAPGPVKSGFEGYVELPPI

SEQ ID NO: 585 - protein, 62 aa, synthetic construct
YMATATNELGQATCAASLTVRPGGSTSPFSSPITSDEEYLSPPEEFPEPGETWPRTPTMKPS

SEQ ID NO: 586 - protein, 62 aa, synthetic construct
QATCAASLTVRPGGSTSPFSSPITSDEEYLSPPEEFPEPGETWPRTPTMKPSPSQNRRSSDT

SEQ ID NO: 587 - protein, 62 aa, synthetic construct
ARRLQESPSLSALSEAQPSSPARPSAPKPSTPKSAEPSATTPSDAPQPPAPQPAQDKAPEPR

SEQ ID NO: 588 - protein, 62 aa, synthetic construct
SALSEAQPSSPARPSAPKPSTPKSAEPSATTPSDAPQPPAPQPAQDKAPEPRPEPVRASKPA

SEQ ID NO: 589 - protein, 62 aa, synthetic construct
LSGHAQGPSQGPAAPPSEPKPHAAVFARVASPPPGAPEKRVPSAGGPPVLAEKARVPTVPPR

SEQ ID NO: 590 - protein, 62 aa, synthetic construct
PALQHRPSPASGPGPGPGLGPGPPDEKLEASPASSPLADSGPDDLAPALEDSLSQEVQDSFS

SEQ ID NO: 591 - protein, 62 aa, synthetic construct
KIKLGICKAATEEENSHGQANGLLNAPSLGSPIRVRSEITQPDRDIPLVRKLRSIHSFELEK

SEQ ID NO: 592 - protein, 62 aa, synthetic construct
SAASDASGFSPGYSPAWSPTPGSPGSPGPSSPYIPSPGGAMSPSYSPTSPAYEPRSPGGYTP

SEQ ID NO: 593 - protein, 62 aa, synthetic construct
ASGFSPGYSPAWSPTPGSPGSPGPSSPYIPSPGGAMSPSYSPTSPAYEPRSPGGYTPQSPSY

SEQ ID NO: 594 - protein, 62 aa, synthetic construct
AWSPTPGSPGSPGPSSPYIPSPGGAMSPSYSPTSPAYEPRSPGGYTPQSPSYSPTSPSYSPT

SEQ ID NO: 595 - protein, 62 aa, synthetic construct
SAGGVPPMPVICQMVPLPANNPVVTTVVPSTPPSQPPAVCPPVVFMGTQVPKGAVMFVVPQP

SEQ ID NO: 596 - protein, 62 aa, synthetic construct
VTEKVLAAVYKALSDHHVYLEGTLLKPNMVTPGHACPIKYTPEEIAMATVTALRRTVPPAVP

SEQ ID NO: 597 - protein, 62 aa, synthetic construct
KALSDHHVYLEGTLLKPNMVTPGHACPIKYTPEEIAMATVTALRRTVPPAVPGVTFLSGGQS

SEQ ID NO: 598 - protein, 62 aa, synthetic construct
VKPPDLWIHHERLELKPIDKSPDPNPIMTDTPIPRNSQDITPVDNSMDSNIHQRRNSYRGHE

SEQ ID NO: 599 - protein, 62 aa, synthetic construct
PGAMMGGQPSGFSQPVIFGTSPAVSGWNQPSPFAASTPPPVPVVWGPSASVAPNAWSTTSPL

SEQ ID NO: 600 - protein, 62 aa, synthetic construct
SPLGNPFQSNIFPAPAVSTQPPSMHSSLLVTPPQPPPRAGPPKDISSDAFTALDPLGDKEIK

SEQ ID NO: 601 - protein, 62 aa, synthetic construct
KNSVTAKLLLEKIQSRKVERKPSVSEEVQATPNKAGPKLKDPPQGYFGPKLPPSLGNKPVLP

SEQ ID NO: 602 - protein, 62 aa, synthetic construct
HHAHSPLEQHPQPPLPPPVPQPQEPQPERLSPAPLAHPSHPERASSARHSSEDSDITSLIEA

SEQ ID NO: 603 - protein, 62 aa, synthetic construct
LPFTTPANTLASIGLMGTENSPAPHAPSTSSPADDLGQTYNPWRIWSPTIGRRSSDPWSNSH

SEQ ID NO: 604 - protein, 62 aa, synthetic construct
NPWSISSCDAFLNVFQSRGLRPEVICPCASSPEALTVAIRRPPDLGGPPPRKAVLSMNGLSY

SEQ ID NO: 605 - protein, 62 aa, synthetic construct
ERTRMNKQQNSPLAKSKPGSTGPEPPIPQASPGPPGPLSQTPPMQRPVEPQEGPHKSLVAHR

SEQ ID NO: 606 - protein, 62 aa, synthetic construct
SPLAKSKPGSTGPEPPIPQASPGPPGPLSQTPPMQRPVEPQEGPHKSLVAHRVPLKPYAAPV

SEQ ID NO: 607 - protein, 62 aa, synthetic construct
FSEIVLSAPEGLPTTPAAPGLPPTEIPPPLSPPRGLVAVRTPRGVLLHWDPPELVPKRLDGY

SEQ ID NO: 608 - protein, 62 aa, synthetic construct
GLPTTPAAPGLPPTEIPPPLSPPRGLVAVRTPRGVLLHWDPPELVPKRLDGYVLEGRQGSQG

SEQ ID NO: 609 - protein, 62 aa, synthetic construct
PDSVAKLKLQGSPVPSLRQSLLWGDPAGTPSPHPDPPSSRGPLPLEPICRGPDGRFVMGPTV

SEQ ID NO: 610 - protein, 62 aa, synthetic construct
RTPAQRLARSFDCSSSSPSGAPQPLCIEDISPVAPPPAAPPSPLPGPGPLLQYLSLPFFREM

SEQ ID NO: 611 - protein, 62 aa, synthetic construct
PEAIAQGGQSKTLRSSTVRAMPVPTTPEFQSPVTTDQPISPEPITQPSCIKRQRAAGNPGSL

SEQ ID NO: 612 - protein, 62 aa, synthetic construct
GEVLASRKDFRMNTCVPHPRGAFMLEPEGMSPMEPAGVSPMPGTQKDTGRTEEQPMEVSVCR

SEQ ID NO: 613 - protein, 62 aa, synthetic construct
PENCCQRSGVQMPTPPPSGYNAWDTLPSPRTPRTTRSSVTSPDEISLSPGDLDTSLCDICMC

SEQ ID NO: 614 - protein, 62 aa, synthetic construct
KSNPTPKPTVSPSSSSPNALVAQGSHSSTNSPVHKQPSGMNISRQSPTLNLLPSSRTSGLPP

SEQ ID NO: 615 - protein, 62 aa, synthetic construct
SPNALVAQGSHSSTNSPVHKQPSGMNISRQSPTLNLLPSSRTSGLPPTKNLQAPSKLTNSSS

SEQ ID NO: 616 - protein, 62 aa, synthetic construct
EPDPEPEQEAPELEPEPELEPPTPQIPEAPTPNVPVWDIGGFTLLDGKLVLLGGEEEGPRRP

SEQ ID NO: 617 - protein, 62 aa, synthetic construct
KKKEATQKVTEQKTKVPEVTKPSLSQPTAASPIGSSPSPPVNGGNNAKRVAVPNGQPPSAAR

SEQ ID NO: 618 - protein, 62 aa, synthetic construct
TQKVTEQKTKVPEVTKPSLSQPTAASPIGSSPSPPVNGGNNAKRVAVPNGQPPSAARYMPRE

SEQ ID NO: 619 - protein, 62 aa, synthetic construct
GDPNSYNYKNVNLWDKNSQGGPAPREPNLPTPMTSKSASVWSKSTPPAPDNGTSAWGEPNES

SEQ ID NO: 620 - protein, 62 aa, synthetic construct
LQEEREMLRKERSKQLQQSPTPTCPTPELGSPLPSRTGSLTDEPADPARVSSRQRLELVALV

SEQ ID NO: 621 - protein, 62 aa, synthetic construct
VARILADLNQQAPAPAPAERREGAAARKARTPCRLPPPAPEPTSPGAEGAAAAPPSPAWSEP

SEQ ID NO: 622 - protein, 62 aa, synthetic construct
ELMSSFRERFGRNWLQYRSHLEPSGNPLPATPTTSAPSAPPASSQGPDTAPRPSPPQEEARG

SEQ ID NO: 623 - protein, 62 aa, synthetic construct
VEAHADGGGDETAERTEAPGTPEGPEPERPSPGDGNPRENSPFLNNVEVEQESFFEGKNMAL

SEQ ID NO: 624 - protein, 62 aa, synthetic construct
ETAERTEAPGTPEGPEPERPSPGDGNPRENSPFLNNVEVEQESFFEGKNMALFEEEMDSNPM

SEQ ID NO: 625 - protein, 62 aa, synthetic construct
GSLERILVGELLTSQPEVDERPCRTPPLQQSPSVIRRLVTISPNNKPKLNTGQIQESIGEAV

SEQ ID NO: 626 - protein, 62 aa, synthetic construct
LQYFKRLIQIPQLPENPPNFLRASALSEHISPVVVIPAEASSPDSEPVLEKDDLMDMDASQQ

SEQ ID NO: 627 - protein, 62 aa, synthetic construct
YDRPLKVEPVYLRGGGGSSRRSSSSSAAASTPPPGPPAPADPLGYLPLHGGYQYKQRSLSPV

SEQ ID NO: 628 - protein, 62 aa, synthetic construct
LSGRGPKAGGRQDEAGTPRRGLGARLQQLLTPSRHSPASRIPPPELPPDLPPPARRSPMDSL

SEQ ID NO: 629 - protein, 62 aa, synthetic construct
PKAGGRQDEAGTPRRGLGARLQQLLTPSRHSPASRIPPPELPPDLPPPARRSPMDSLLHPRE

SEQ ID NO: 630 - protein, 62 aa, synthetic construct
QQLLTPSRHSPASRIPPPELPPDLPPPARRSPMDSLLHPRERPGSTASESSASLGSEWDLSE

SEQ ID NO: 631 - protein, 62 aa, synthetic construct
FAEAEDGGSSVPPSPYSTPSYLSVPLPAEPSPGARAPWEPTPSAPPARWGHGARRRCDLALL

SEQ ID NO: 632 - protein, 62 aa, synthetic construct
VPPSPYSTPSYLSVPLPAEPSPGARAPWEPTPSAPPARWGHGARRRCDLALLGCATLLGAVG

SEQ ID NO: 633 - protein, 62 aa, synthetic construct
AGPAERARHQPPQPKAPGFLQPPPLRQPRTTPPPGAQCEVPASPQRPSRPGALPEQTRPLRA

SEQ ID NO: 634 - protein, 62 aa, synthetic construct
QPKAPGFLQPPPLRQPRTTPPPGAQCEVPASPQRPSRPGALPEQTRPLRAPPSSQDKIPQQN

SEQ ID NO: 635 - protein, 62 aa, synthetic construct
TESDTVKRRPKCREREPLQTALLAFGVASATPGPAAPLPSPTPGESPPASSLPQPEPSSLPA

SEQ ID NO: 636 - protein, 62 aa, synthetic construct
EPLQTALLAFGVASATPGPAAPLPSPTPGESPPASSLPQPEPSSLPAQGVPTPLAPSPAMQP

SEQ ID NO: 637 - protein, 62 aa, synthetic construct
PLPSPTPGESPPASSLPQPEPSSLPAQGVPTPLAPSPAMQPPVPPCPGPGLESSAASRWNGE

SEQ ID NO: 638 - protein, 62 aa, synthetic construct
TPGESPPASSLPQPEPSSLPAQGVPTPLAPSPAMQPPVPPCPGPGLESSAASRWNGETEPPA

SEQ ID NO: 639 - protein, 62 aa, synthetic construct
RPDGLGAAAGGARLSSLPQAAYGPAPPLCHTPAATAAAEFQPPYFPPPYPQPPLPYGQAPDA

SEQ ID NO: 640 - protein, 62 aa, synthetic construct
SRNDMCHSLGLTCLEPQKTTPPTTRPPPTTTPEPTAPPRLQLVAQSGGQHCAGVVEFYSGSL

SEQ ID NO: 641 - protein, 62 aa, synthetic construct
DGRTIPVVFKDVIRPGMRRKVPGEGLPLPKTPEKRGDLIIEFEVIFPERIPQTSRTVLEQVL

SEQ ID NO: 642 - protein, 62 aa, synthetic construct
DEEEEDEGEAEKPSYHPIAPHSQVYQPAKPTPLPRKRSEASPHENTNHKSPHKNSISLKEQE

SEQ ID NO: 643 - protein, 62 aa, synthetic construct
ALGPTSTEGHGALSISPLSRSPGSHADFLLTPLSPTASQGSPSFCVGSLEEDSPFPSFAQML

SEQ ID NO: 644 - protein, 62 aa, synthetic construct
PIQDSLSQAQTSQPPSPQVFSPGSSNSRPPSPMDPYAKMVGTPRPPPVGHSFSRRNSAAPVE

SEQ ID NO: 645 - protein, 62 aa, synthetic construct
RETPSKAFHQYSNNISTLDVHCLPQLPEKASPPASPPIAFPPAFEAAQVEAKPDELKVTVKL

SEQ ID NO: 646 - protein, 62 aa, synthetic construct
RTPSFELPDASERPPTYCELVPRVPSVQGTSPSQSCPEPEAPWWEAEEDEEEENRCFTRPQA

SEQ ID NO: 647 - protein, 62 aa, synthetic construct
HTSVDPRQTQFGGLNTPYPGGLNTPYPGGMTPGLMTPGTGELDMRKIGQARNTLMDMRLSQV

SEQ ID NO: 648 - protein, 62 aa, synthetic construct
LQLRPPPEPSTPVSGQDDLIQHQDMRILELTPEPDRPRILPPDQRPPEPPEPPPVTEEDLDY

SEQ ID NO: 649 - protein, 62 aa, synthetic construct
KPNSQGPPNPMALPSEHGLEQPSHTPPQTPTPPSTPPLGKQNPSLPAPQTLAGGNPETAQPH

SEQ ID NO: 650 - protein, 62 aa, synthetic construct
SAQLFGSGKLASPSEVVQQVAEKQYPPHRPSPYSCQHSLSFPQHSLPQGVMHSTKPHQSLEG

SEQ ID NO: 651 - protein, 62 aa, synthetic construct
SESAELVACTQDKAPSPSETCDSEISEAPVSPEWAPPGDGAESGGKPSPSQQVQQQSYHTQP

SEQ ID NO: 652 - protein, 62 aa, synthetic construct
PTSEAGLSLPLRGPRARRSASPHDVDLCLVSPCEFEHRKAVPMAPAPASPGSSNDSSARSQE

SEQ ID NO: 653 - protein, 62 aa, synthetic construct
SSSSSSSSSSSSSSSASSSSSSSSSSPPPASPPASSPPRVLELPGVPAAAFSDVLNFIYSAR

SEQ ID NO: 654 - protein, 62 aa, synthetic construct
SSSSSSSSSSASSSSSSSSSSPPPASPPASSPPRVLELPGVPAAAFSDVLNFIYSARLALPG

SEQ ID NO: 655 - protein, 62 aa, synthetic construct
NTLKLYRLLPMRAAKRPYKTYSQGAPEAPLSPTLNTPAPVAMPASPPPGPPPAPEPGPPPSV

SEQ ID NO: 656 - protein, 62 aa, synthetic construct
YRLLPMRAAKRPYKTYSQGAPEAPLSPTLNTPAPVAMPASPPPGPPPAPEPGPPPSVITFAH

SEQ ID NO: 657 - protein, 62 aa, synthetic construct
HLPQLQCRDESVSKEQHMIPSPIVHQPFQVTPTPPVGSSYQPMQTNVVYNGPTCLPINAASS

SEQ ID NO: 658 - protein, 62 aa, synthetic construct
PVADQITGQPSSQLQPITYGPSHSGSATTASPAASHPLASSPLSGPPSPQLQPMPYQSPSSG

SEQ ID NO: 659 - protein, 62 aa, synthetic construct
SSQLQPITYGPSHSGSATTASPAASHPLASSPLSGPPSPQLQPMPYQSPSSGTASSPSPATR

SEQ ID NO: 660 - protein, 62 aa, synthetic construct
WLRENPGGSEESLRKLPGPLPPAGSLQTSVTPRPSWAEAPWLVGGQPALWSILLMPPRYGIP

SEQ ID NO: 661 - protein, 62 aa, synthetic construct
VVLLSEPACAHALEALATLLRPRYLDLLVSSPAFPQPVGSLSPEPMPLERFGRRFPLAPGRR

SEQ ID NO: 662 - protein, 62 aa, synthetic construct
KGTTQPQVPSGKENIAPQPQTPHGAVLLAPTPPGKNSCGPLLLSHPPEASPLSWTPVPPGPW

SEQ ID NO: 663 - protein, 62 aa, synthetic construct
QTPHGAVLLAPTPPGKNSCGPLLLSHPPEASPLSWTPVPPGPWVPGHWLPPGFSMPPPVVCR

SEQ ID NO: 664 - protein, 62 aa, synthetic construct
AVLLAPTPPGKNSCGPLLLSHPPEASPLSWTPVPPGPWVPGHWLPPGFSMPPPVVCRLLYQE

SEQ ID NO: 665 - protein, 62 aa, synthetic construct
APSVSSASGNATPNTPGDESPCGIIIPHENSPDQQQPEEHRPKIGLSLKLGASNSPGQPNSV

SEQ ID NO: 666 - protein, 62 aa, synthetic construct
SGGDHPQAEPKLATEAEGTTGPRLPLPSVPSPSQEGAPLPSEEASAPDAPDALPDSPTPATG

SEQ ID NO: 667 - protein, 62 aa, synthetic construct
QGALLPREQFAAPLGRPVGTSYSATYPAYVSPDVAQSWTAGPFDGSVLHGLPGRRPTFVSDF

SEQ ID NO: 668 - protein, 62 aa, synthetic construct
ASIRKGNAIDEADIPPPVAIGKGPASTPTYSPAPTQPAPRIASAPEPRVTLEGPSATAPASS

SEQ ID NO: 669 - protein, 62 aa, synthetic construct
HGPRSALGGAREVPDAPPAACPEVSQARLLSPAREERGLSGKSTPEPTLPSAVATEASLDSC

SEQ ID NO: 670 - protein, 62 aa, synthetic construct
VSLNSPSAASSPGLMMSVSPVPSSSAPISPSPPGAPPAKVPSASPTADMAGALHPSAKVNPN

SEQ ID NO: 671 - protein, 62 aa, synthetic construct
LGASLLTQASTLMSVQPEADTQGQPAPSKGTPKIVFNDASKEAGPKPLGSGPGPGPAPGAKT

SEQ ID NO: 672 - protein, 62 aa, synthetic construct
EPSKTPSSVQEKKTRVPTKAEPMPKPPPETTPTPATPKVKSGVRRAEPATPVVKAVPEAPKG

SEQ ID NO: 673 - protein, 62 aa, synthetic construct
PSSVQEKKTRVPTKAEPMPKPPPETTPTPATPKVKSGVRRAEPATPVVKAVPEAPKGGEAED

SEQ ID NO: 674 - protein, 62 aa, synthetic construct
SGGRVIPDVRVTQHFAKETQDPLKLHSSPASPSSASKEIGMPFSQGPGTPATTAVAPCPAGL

SEQ ID NO: 675 - protein, 62 aa, synthetic construct
GPRATAEFSTQTPSPAPASDMPRSPGAPTPSPMVAQGTQTPHRPSTPRLVWQESSQEAPFMV

SEQ ID NO: 676 - protein, 62 aa, synthetic construct
QTRMVHASASTSPLCSPTETQPTTHGYSQTTPPSVSQLPPEPPGPPGFPRVPSAGADGPLAL

SEQ ID NO: 677 - protein, 62 aa, synthetic construct
GRGESLACQTEPDGQAQGVAGPQLVGPTAISPYLPGIQIVTPGPLGRFEKKKPDPLEIGYQA

SEQ ID NO: 678 - protein, 62 aa, synthetic construct
GPLDLYPKLADTIQTNPIPTHLSLVDSAQASPMPVDSVEADPTAVGPVLAGPVPVDPGLVDL

SEQ ID NO: 679 - protein, 62 aa, synthetic construct
ISDNLPPVDAVPSGPAPVDLALVDPVPNDLTPVDPVLVKSRPTDPRRGAVSSALGGSAPQLL

SEQ ID NO: 680 - protein, 62 aa, synthetic construct
PSLPETPTGLADIPCLVIPPAPAKKTALQRSPETPLEICLVPVGPSPASPSPEPPVSKPVAS

SEQ ID NO: 681 - protein, 62 aa, synthetic construct
PETPTGLADIPCLVIPPAPAKKTALQRSPETPLEICLVPVGPSPASPSPEPPVSKPVASSPT

SEQ ID NO: 682 - protein, 62 aa, synthetic construct
LVIPPAPAKKTALQRSPETPLEICLVPVGPSPASPSPEPPVSKPVASSPTEQVPSQEMPLLA

SEQ ID NO: 683 - protein, 62 aa, synthetic construct
PPAPAKKTALQRSPETPLEICLVPVGPSPASPSPEPPVSKPVASSPTEQVPSQEMPLLARPS

SEQ ID NO: 684 - protein, 62 aa, synthetic construct
ETPLEICLVPVGPSPASPSPEPPVSKPVASSPTEQVPSQEMPLLARPSPPVQSVSPAVPTPP

SEQ ID NO: 685 - protein, 62 aa, synthetic construct
DVMLTGDTLSTSLQSSPEVQVPPTSFETEETPRRVPPDSLPTQGETQPTCLDVIVPEDCLHQ

SEQ ID NO: 686 - protein, 62 aa, synthetic construct
QLNQSQVAWTGSRPPFPGQQIPSQSSKTQSSPFGIGTSHTYPADPSSYSPLSSPATSSPSGN

SEQ ID NO: 687 - protein, 62 aa, synthetic construct
YIEDILGRGPAAPTPAPTLPSPNSSFTSLVSPYRTPVYEPTPIHPAFSHHSAAALAAAYGPG

SEQ ID NO: 688 - protein, 62 aa, synthetic construct
PHPSVGGSPASLFIPSPPSFLPLANQQLFRSPRRTSPSSLPGRLSRALSLGTIPSLTRADSG

SEQ ID NO: 689 - protein, 62 aa, synthetic construct
YGAGQQDLATPLESGAGARGSFNKFQPQPSTPQPQPPPQPQPQQQQPQPQPPAQPHLYLQRG

SEQ ID NO: 690 - protein, 62 aa, synthetic construct
IQNPSWLGNNGAASPVPACVVPCDPVPACMSPHAHPPGSGASSVTDFLSVSGAGSHVGQTHM

SEQ ID NO: 691 - protein, 62 aa, synthetic construct
PLAPRQPALVGAPGLSIKEPAPLPSRPQVPTPAPLLPDSKATIPPNGSPKPLQPLPTPVLTI

SEQ ID NO: 692 - protein, 62 aa, synthetic construct
KEPAPLPSRPQVPTPAPLLPDSKATIPPNGSPKPLQPLPTPVLTIAPHPGVQPQLAPQQPPP

SEQ ID NO: 693 - protein, 62 aa, synthetic construct
TTHASVIQTVNHVLQGPGGKHIAHIAPSAPSPAVQLAPATPPIGHITVHPATLNHVAHLGSQ

SEQ ID NO: 694 - protein, 62 aa, synthetic construct
ASATPFGTDMDFSPPRPPYPSYPHEDPACETPYLSEGFGYGMPPLYPQTGPPPSYRPGLRMF

SEQ ID NO: 695 - protein, 62 aa, synthetic construct
SDPYGGRGSSFSLGLPFSPPAPFRPPPLPASPPLEGPFPSQSDVHPLPAEGYNKVGPGYGPG

SEQ ID NO: 696 - protein, 62 aa, synthetic construct
DNLLSRYISGSHLPPQPTSTMNPSPGPSALSPGSSGLSNSHTPVRPPSTSSTGSRGSCGSSG

SEQ ID NO: 697 - protein, 62 aa, synthetic construct
PNPSTPLPNTVPQFIAREPYELTVPALYPSSPEVWAPYPLYPAELAPALPPPAFTYPASLHA

SEQ ID NO: 698 - protein, 62 aa, synthetic construct
GVFPSLLVEELLGPPGPPELSDPEQMLPSPSPPSFSPPAPTSVLDGPPAPVLPGDKALDFPG

SEQ ID NO: 699 - protein, 62 aa, synthetic construct
SAPSAGGGPDGEQPTGPPSATSSGADGPANSPDGGSPRPRRRLGPPPAGRPAFGDLAAEDLV

SEQ ID NO: 700 - protein, 62 aa, synthetic construct
QYPYTGYNPLQYPVGPTNGVYPGPYYPGYPTPSGQYVCSPLPTSTMSPEEVEQHMRNLQQQE

SEQ ID NO: 701 - protein, 62 aa, synthetic construct
GKEAEGSLTEASLPEAQVASGAGAGAPRASSPEKAEEDRRLPGSQAPPALVSSSQSLLEWCQ

SEQ ID NO: 702 - protein, 62 aa, synthetic construct
AAAAEGQAPDPSPAPGPPTAADSQQPPGGSSPSEEPPPSPGEEAGLQRFQDTSQYVCAELQA

SEQ ID NO: 703 - protein, 62 aa, synthetic construct
QPKSLKVRAGQRPPGLPLPIPGALGPPNTGTPIEQQPCSPGQEAVLDQRMLGEEEEAVGERR

SEQ ID NO: 704 - protein, 62 aa, synthetic construct
RKGTVSSQGTEVVFASASVTPPRTPDSAPPSPAEAYPITPASVSARPPVAFPRRETSCAARA

SEQ ID NO: 705 - protein, 62 aa, synthetic construct
GPLPQASDPAVARQHRPLPSTPDSSHHAQATPRWRYNKPLPPTPDLPQPHLPPISAPGSSRI

SEQ ID NO: 706 - protein, 62 aa, synthetic construct
LGTPPPLLAARLVPPRNLMGSSIGYHTSVSSPTPLVPDTYEPDGYNPEAPSITSSGRSQYRQ

SEQ ID NO: 707 - protein, 62 aa, synthetic construct
GRGMLSPRAQEEEEKRDVFEFPLPKPPDDPSPSEPLPKPPRHPPKPLKRLNSEPWGLVAPPQ

SEQ ID NO: 708 - protein, 62 aa, synthetic construct
PGLLERRGSGTLLLDHISQTRPGFLPPLNVSPHPPIPDIRPQPGGRAPSLPAPPYAGAPGSP

SEQ ID NO: 709 - protein, 62 aa, synthetic construct; identical to SEQ ID NO: 31

SEQ ID NO: 710 - protein, 62 aa, synthetic construct
PVSRQSIRNSQKHSPTSEPTPPGDALPPVSSPHTHRGYQPTPAMAKYVKILYDFTARNANEL

SEQ ID NO: 711 - protein, 62 aa, synthetic construct
PVALQPAFPLGNGDGAFVSCLPLAAARPSPSPPAAPARPSVPPPAAPQYAQCTLEGAYEPGA

SEQ ID NO: 712 - protein, 62 aa, synthetic construct
QSRSCTELHKHLTSAQCCLQDRGLQPPCLQSPRLPAKEDKEPGEDCPSPQPAPASPRDSLAL

SEQ ID NO: 713 - protein, 62 aa, synthetic construct
PAPRGSGTASDDEFENLRIKGPNAVQLVKTTPLKPSPLPVIPDTIKEVIYDMLNALAAYHAP

SEQ ID NO: 714 - protein, 62 aa, synthetic construct
SGTASDDEFENLRIKGPNAVQLVKTTPLKPSPLPVIPDTIKEVIYDMLNALAAYHAPEEADK

SEQ ID NO: 715 - protein, 62 aa, synthetic construct
VSQNRSPHQESLSENNPAQSYLTQKSSSSVSPSSNAPGSCSPDGVDQQLLDDFHRVTKGGST

SEQ ID NO: 716 - protein, 62 aa, synthetic construct
VHHCVVVKPTPAMLTTPSPSLTTALLPEELSPSPSVLPPSLPDLHPKGEYPPDLFSVEERRQ

SEQ ID NO: 717 - protein, 62 aa, synthetic construct
IISLASMNSDCSTPSKPTSESFDLELASPKTPRVEQEEPISPGSTLPEVKLRRSKKRTKRSS

SEQ ID NO: 718 - protein, 62 aa, synthetic construct
VRGATVEGQNGSKSNSPPALGPEACPVSLPSPPEASTLKGPPPEADLPRSPGNLTEREELAG

SEQ ID NO: 719 - protein, 62 aa, synthetic construct
TAVPAEEPPGPQQLVSPGRERPDLEAPAPGSPFRVRRVRASELRSFSRMLAGDPGCSPGAEG

SEQ ID NO: 720 - protein, 62 aa, synthetic construct
GSCPRGPFCAFAHVEQPPLSDDLQPSSAVSSPTQPGPVLYMPSAAGDSVPVSPSSPHAPDLS

SEQ ID NO: 721 - protein, 62 aa, synthetic construct
VETLGVPLQEATELGDPTQADSARPEQSSQSPVQAVPGSGDSQPDDPPDRGTGLSASQRASQ

SEQ ID NO: 722 - protein, 62 aa, synthetic construct
NSVFGGAGAASAPTGTPSGQPLAVAPGLGSSPLVPAPNVILHRTPTPIQPKPAGVLPPKLYQ

SEQ ID NO: 723 - protein, 62 aa, synthetic construct
TPSGQPLAVAPGLGSSPLVPAPNVILHRTPTPIQPKPAGVLPPKLYQLTPKPFAPAGATLTI

SEQ ID NO: 724 - protein, 62 aa, synthetic construct
QPAPQAPPAVSTPLPLGLQQPQAQQPPQAPTPQAAAPPQATTPQPSPGLASSPEKIVLGQPP

SEQ ID NO: 725 - protein, 62 aa, synthetic construct
LGLQQPQAQQPPQAPTPQAAAPPQATTPQPSPGLASSPEKIVLGQPPSATPTAILTQDSLQM

SEQ ID NO: 726 - protein, 62 aa, synthetic construct
PAPQIPAAAPLKGPGPSSSPSLPHQAPLGDSPHLPSPHPTRPPSRPPSRPQSVSRPPSEPPL

SEQ ID NO: 727 - protein, 62 aa, synthetic construct
PAAAPLKGPGPSSSPSLPHQAPLGDSPHLPSPHPTRPPSRPPSRPQSVSRPPSEPPLHPCPP

SEQ ID NO: 728 - protein, 62 aa, synthetic construct
YTPQTHTSFGMPPSSAPPSNSGAGILPSPSTPRFPTPRTPRTPRTPRGAGGPASAQGSVKYE

SEQ ID NO: 729 - protein, 62 aa, synthetic construct
HTSFGMPPSSAPPSNSGAGILPSPSTPRFPTPRTPRTPRTPRGAGGPASAQGSVKYENSDLY

SEQ ID NO: 730 - protein, 62 aa, synthetic construct
ADVNLPAAQLQIAMGVPLHRLKDIRLLYGESPWGVTPISFETPSNPPLARGHVIAARITSEN

SEQ ID NO: 731 - protein, 62 aa, synthetic construct
AFRGPPLARLPHDPGVFRVYPRPRGGPEPLSPFPVSPLAGPGSLLPPQLSPALPMTPTHLAY

SEQ ID NO: 732 - protein, 62 aa, synthetic construct
PLARLPHDPGVFRVYPRPRGGPEPLSPFPVSPLAGPGSLLPPQLSPALPMTPTHLAYTPSPT

SEQ ID NO: 733 - protein, 62 aa, synthetic construct
YPRPRGGPEPLSPFPVSPLAGPGSLLPPQLSPALPMTPTHLAYTPSPTLSPMYPSGGGGPSG

SEQ ID NO: 734 - protein, 62 aa, synthetic construct
QPLQIQSGVLTQGSCTPLMVATLHPQVATITPQYAVPFTLSCAAGRPALVEQTAAVLQAWPG

SEQ ID NO: 735 - protein, 62 aa, synthetic construct
GSSAPPPKAPAPPPKPETPEKTTSEKPPEQTPETAMPEPPAPEKPSLLRPVEKEKEKEKVTR

SEQ ID NO: 736 - protein, 62 aa, synthetic construct
SFPKPAPRKDQESPKMPRKEPPPCPEPGILSPSIVLTKAQEADRGEGPGKQVPAPRLRSFTC

SEQ ID NO: 737 - protein, 62 aa, synthetic construct
QGKPKTPVSSQAPVPAKRPIKPSRSEINQQTPPTPTPRPPLPVKSPAVLHLQHSKGRDYRDN

SEQ ID NO: 738 - protein, 62 aa, synthetic construct
TPVSSQAPVPAKRPIKPSRSEINQQTPPTPTPRPPLPVKSPAVLHLQHSKGRDYRDNTELPH

SEQ ID NO: 739 - protein, 62 aa, synthetic construct
NFLTDAKRPALPEIKPAQPPGPAQILPPGLTPGLPYPHQTPQGLMPYGQPRPPILGYGAGAV

SEQ ID NO: 740 - protein, 62 aa, synthetic construct
TLLGVVKEGSTSAKVQWDEAEITISFPTFWSPSDTPLYNLEPCEPLPFDVARFRGLTASVLL

SEQ ID NO: 741 - protein, 62 aa, synthetic construct
PQAQPPKPVPKPRTVFGGLSGPATTQRPGLSPALGGPGVSRSPEPSPRPPPLPTSSSEQSSA

SEQ ID NO: 742 - protein, 62 aa, synthetic construct
LGAALEMFASENSPEPLSLIQPQDIVCLGVSPPPTDPGDRFPFSFELILAGGRIQHFGTDGA

SEQ ID NO: 743 - protein, 62 aa, synthetic construct
PGPASSGDQMQRLLQGPAPRPPGEPPGSPKSPGHSTGSQRPPDSPGAPPRSPSRKKRRAVGA

SEQ ID NO: 744 - protein, 62 aa, synthetic construct
PSAGAAVTARPGQEIRQRTAAQRNLSPTPASPNQGPPPQVPVSPGPPKDSSAPGGPPERTVT

SEQ ID NO: 745 - protein, 62 aa, synthetic construct
GPAAGPGGTRSPRAGYLSDGDSPERPAGPPSPTSFRPYEVGPAARAPPAALWGRLSLHLYGL

SEQ ID NO: 746 - protein, 62 aa, synthetic construct
PSQSPTNQTSPISPTHPHSKAPQIPREDGPSPKLALWLPSPAPTAAPTALGEAGLAEHSQRD

SEQ ID NO: 747 - protein, 62 aa, synthetic construct
RSLESEMYLEGLGRSHIASPSPCPDRMPLPSPTESRHSLSIPPVSSPPEQKVGLYRRQTELQ

SEQ ID NO: 748 - protein, 62 aa, synthetic construct
PLGTGTSILSKQVQNKPKTGRSLLGGPAALSPLTPSFGILPLETPSPGDGSYLQNYTNTPPV

SEQ ID NO: 749 - protein, 62 aa, synthetic construct
TKSVFSQSGNSREVTPILAQTQSSGPQTSTTPQVLSPTITSPPNALPRRSSRLFTSDSSTTK

SEQ ID NO: 750 - protein, 62 aa, synthetic construct
SQSGNSREVTPILAQTQSSGPQTSTTPQVLSPTITSPPNALPRRSSRLFTSDSSTTKENSKK

SEQ ID NO: 751 - protein, 62 aa, synthetic construct
SREVTPILAQTQSSGPQTSTTPQVLSPTITSPPNALPRRSSRLFTSDSSTTKENSKKLKMKF

SEQ ID NO: 752 - protein, 62 aa, synthetic construct
STAPSSQETVQPTSPATALRTPTLPETMSSSPTAASTTHRYPKTPSPTVAHESNWAKCEDLE

SEQ ID NO: 753 - protein, 62 aa, synthetic construct
PTADYVFPDLTEKAGSIEDTSQAQELPNLPSPLPKMNLVEPPWHMPPREEEEEEEEEEEREK

SEQ ID NO: 754 - protein, 62 aa, synthetic construct
RQRMDILDVLTLAAQELSRPGCLGRTPQPGSPSPNTPCLPEAAVSQPGSAVASDWRVVVEER

SEQ ID NO: 755 - protein, 62 aa, synthetic construct
ILDVLTLAAQELSRPGCLGRTPQPGSPSPNTPCLPEAAVSQPGSAVASDWRVVVEERIRSKT

SEQ ID NO: 756 - protein, 62 aa, synthetic construct
TKVPLAMASSLFRVPEPPSSHSQGSGPSSGSPERGGDGLTFPRQLMEVSQLLRLYQARGWGA

SEQ ID NO: 757 - protein, 62 aa, synthetic construct
QFAMPPATYDTAGLTMPTATLGNLRGYGMASPGLAAPSLTPPQLATPNLQQFFPQATRQSLL

SEQ ID NO: 758 - protein, 62 aa, synthetic construct
MPTATLGNLRGYGMASPGLAAPSLTPPQLATPNLQQFFPQATRQSLLGPPPVGVPMNPSQFN

SEQ ID NO: 759 - protein, 62 aa, synthetic construct
GSHELENHQIADSMEFGFLPNPVAVKPLTESPFKVHLEKLSLRQRKPDEDMKLYQTPLELKL

SEQ ID NO: 760 - protein, 62 aa, synthetic construct
NQSSLQFSNPSGSLVTPSLVTSSLTDPRLLSPQQPALQRNSVSPGLPQRPASAGAMLGGDLN

SEQ ID NO: 761 - protein, 62 aa, synthetic construct
FALSQVGDLAFPRFEIPAQRFALPAHYLERSPAWWYPYTLTPAGGHLPRPEASEKALLRDSS

SEQ ID NO: 762 - protein, 62 aa, synthetic construct
GDYSAYGVPLKPLCHAAGQTLPAIPVPIKPTPAAVPALPALPAPIPTLLSNSPPSLSPTSSQ

SEQ ID NO: 763 - protein, 62 aa, synthetic construct
SPPRPQPGHCDGDGEGGFACAPGPVPAAPGSPGEERPPGPQPQLQLPAGDGARPPGAQGLKN

SEQ ID NO: 764 - protein, 62 aa, synthetic construct
PMAPPTALLQEEPLFSPRFPFPTVPPAPGVSPLPAPAAFPPTPQSVPSPAPTPFPIELLPLG

SEQ ID NO: 765 - protein, 62 aa, synthetic construct
VSSTLLRSPGSPQETVPEFPCTFLPPTPAPTPPRPPPGPATLAPSRPLLVPKAERLSPPAPS

SEQ ID NO: 766 - protein, 62 aa, synthetic construct
PGAHRPKGPAKTKGPRHQRKHHESITPPSRSPTKEAPPGLNDDAQIPASQESVATSVDGSDS

SEQ ID NO: 767 - protein, 62 aa, synthetic construct
MLPPSHPDPAFSIFPPDAPKLPENQTSPGESPERGGPAEVVHDSPVPEVTWGPEDEELWRKL

SEQ ID NO: 768 - protein, 62 aa, synthetic construct
LQDHRDVVMLDNLPDLPPALVPSPPKRARPSPGHCLPEDEDPEERLRRHDQHITAVLTKIIE

SEQ ID NO: 769 - protein, 62 aa, synthetic construct
SYSHPHHPQSPLSPHSPIPPHPSYPPLPPPSPHTPHSPLPPTSPHGPLHASGPPGTANPPSA

SEQ ID NO: 770 - protein, 62 aa, synthetic construct
HPHHPQSPLSPHSPIPPHPSYPPLPPPSPHTPHSPLPPTSPHGPLHASGPPGTANPPSANPK

SEQ ID NO: 771 - protein, 62 aa, synthetic construct
SPHSPIPPHPSYPPLPPPSPHTPHSPLPPTSPHGPLHASGPPGTANPPSANPKAKPSRISTV

SEQ ID NO: 772 - protein, 62 aa, synthetic construct
GTEFMQDPDEEHLKKSSQVPRTEAPAPASSTPQEPWPGPTAPSPTSRPPWAVDPAFAERYAP

SEQ ID NO: 773 - protein, 62 aa, synthetic construct
LKKSSQVPRTEAPAPASSTPQEPWPGPTAPSPTSRPPWAVDPAFAERYAPDKTSTVLTRHSQ

SEQ ID NO: 774 - protein, 62 aa, synthetic construct
AALRGSFSRLAFSDDLGPLGPPLPVPACSLTPRLGGPDWVSAGGRVPGPLSLPSPESQFSPG

SEQ ID NO: 775 - protein, 62 aa, synthetic construct
TAPSPGYNSHLQYGADPAAAAAAAFSSYVGSPYDHTPGMAGSLGYHPYAAPLGSYPYGDPAY

SEQ ID NO: 776 - protein, 62 aa, synthetic construct
HRDASSIGSVGLGGFCTASESSASLDPCLVSPEVTEPRKDPQGARGPEGSLLPSPPPSQERE

SEQ ID NO: 777 - protein, 62 aa, synthetic construct
RGTKPNQVVCVAAGGQPEGGLPVSPEPSLLTPTEEAHPASSLASFPAAQIPIAVEEPGSSSR

SEQ ID NO: 778 - protein, 62 aa, synthetic construct
DNQQENPPPTKKIGKKPVAKMPLRRPKMKKTPEKLDNTPASPPRSPAEPNDIPIAKGTYTFD

SEQ ID NO: 779 - protein, 62 aa, synthetic construct
SPSDRQSWPSPAVKGRFKSQLPDLSGPHSYSPGRNSVAGSNPAKPGLGSPGRYSPVHGSQLR

SEQ ID NO: 780 - protein, 62 aa, synthetic construct
AGEGEAMEEGDSGGSQPSTTSPFKQEVFVYSPSPSSESPSLGAAATPIIMSRSPTDAKSRNS

SEQ ID NO: 781 - protein, 62 aa, synthetic construct
ENAPPTDPNNNQTPANGTSVSYITFSPDSSSPAQSEPPASAEAPGEPSDMLASVPPFVTFHT

SEQ ID NO: 782 - protein, 62 aa, synthetic construct
SQYGTPVFSAPGHALHPGEPALGEAEERCLSPDDSTVKMASPPPSGPPSATHTPFHQSPVEE

SEQ ID NO: 783 - protein, 62 aa, synthetic construct
SSPQKGLEVERWLAESPVGLPPEEEDKLTRSPFEIISPPASPPEMVGQRVPSAPGQESPIPD

SEQ ID NO: 784 - protein, 62 aa, synthetic construct
HMKNEPTTPSWLADIPPWVPKDRPLPPAPLSPAPGPPTPAPESHTPAPFSWGTAEYDSVVAA

SEQ ID NO: 785 - protein, 62 aa, synthetic construct
TPSWLADIPPWVPKDRPLPPAPLSPAPGPPTPAPESHTPAPFSWGTAEYDSVVAAVQEGAAE

SEQ ID NO: 786 - protein, 62 aa, synthetic construct
SDTPTFSYAALAGPTVPPRPEPGPSMEPSLTPPAVPPRAPILSKGPSPPLNGNILSCSPDRR

SEQ ID NO: 787 - protein, 62 aa, synthetic construct
RFSPSLEAAEQESGELDPGMEPAAHSLWDLTPLSPAPPASLDLALAPAPSLPGDMGDGILPC

SEQ ID NO: 788 - protein, 62 aa, synthetic construct
TQTASPARHTTSVSPSPAGRSPLKGSVQSFTPSPVEYHSPGLISNSPVLSGSYSSGISSLSR

SEQ ID NO: 789 - protein, 62 aa, synthetic construct
LDSTAHTAKQDTVELQNQKSSAPVHAPRSHSPVKRKPDKITANEDPPVISKRRHYDTDEVRQ

SEQ ID NO: 790 - protein, 62 aa, synthetic construct
PFNIDLGQQSQRSTPRPSLPMEKIVIKSEYSPGLTQGPSGSPQLRPPSAGPAFSMANSALST

SEQ ID NO: 791 - protein, 62 aa, synthetic construct
FFNSYYIGKSPKKISSPKKVVTSPRKVPPPSPKSSGPKRALPPKTLANYFKVSPKPKNNEEI

SEQ ID NO: 792 - protein, 62 aa, synthetic construct
PVPEKKLEPVVFEKVKMPQKKEDPQLPRKSSPKSTAPVMDLLGLDAPVACSIANSKTSNTLE

SEQ ID NO: 793 - protein, 62 aa, synthetic construct
GPTQLIQPRAPGPHAMPVAPGPALYPAPAYTPELGLVPRSSPQHGVVSSPYVGVGPAPPVAG

SEQ ID NO: 794 - protein, 62 aa, synthetic construct
GPQAAPLTIRGPSSAGQSTPSPHLVPSPAPSPGPGPVPPRPPAAEPPPCLRRGAAAADLLSS

SEQ ID NO: 795 - protein, 62 aa, synthetic construct
QDLVLGGDVPISSIQATIAKLSIRPPGGLESPVASLPGPAEPPGLPPASLPESTPIPSSSPP

SEQ ID NO: 796 - protein, 62 aa, synthetic construct
LPGPAEPPGLPPASLPESTPIPSSSPPPLSSPLPEAPQPKEEPPVPEAPSSGPPSSSLELLA

SEQ ID NO: 797 - protein, 62 aa, synthetic construct
HGDSPAPLPPQGMLVQPGMNLPHPGLHPHQTPAPLPNPGLYPPPVSMSPGQPPPQQLLAPTY

SEQ ID NO: 798 - protein, 62 aa, synthetic construct
GMNLPHPGLHPHQTPAPLPNPGLYPPPVSMSPGQPPPQQLLAPTYFSAPGVMNFGNPSYPYA

SEQ ID NO: 799 - protein, 62 aa, synthetic construct
KVQCAEVNRASTEGESPDGPGQGGLCQNGPTPPFPDPPSSLDPTTSPVGPDASPGVAGFHDN

SEQ ID NO: 800 - protein, 62 aa, synthetic construct
RRLCDLERERWAVIQGQAVRKSSTVATLQGTPDHGDPRTPGPPRSTPLEENVVDREQIDFLA

SEQ ID NO: 801 - protein, 62 aa, synthetic construct
GQAVRKSSTVATLQGTPDHGDPRTPGPPRSTPLEENVVDREQIDFLAARQQFLSLEQANKGA

SEQ ID NO: 802 - protein, 62 aa, synthetic construct
PPDPPAPETLLAPPPLPSTPDPPRRELRAPSPPVEHPRLLRSVPTPLVMAQKISERMAGNEA

SEQ ID NO: 803 - protein, 62 aa, synthetic construct
MAQKISERMAGNEALSPTSPFREGRPGEWRTPAARGPRSGDPGPGPSHPAQPKAPRFPSNII

SEQ ID NO: 804 - protein, 62 aa, synthetic construct
EDLSKDSLGPTKSSKIEGAGTSISEPPSPISPYASESCGTLPLPLRPCGEGSEMVGKENSSP

SEQ ID NO: 805 - protein, 62 aa, synthetic construct
YLKALAAYKDNQECQATVETVELDPAPPSQTPSPPPMATVDPASPAPASIEPPALSPSIVVN

SEQ ID NO: 806 - protein, 62 aa, synthetic construct
APPSQTPSPPPMATVDPASPAPASIEPPALSPSIVVNSTLSSYVANQASSGAGGQPNITKLI

SEQ ID NO: 807 - protein, 62 aa, synthetic construct
IKSVPLPTLKMQTTLVPPTVESSPERPMNNSPEAHTVEAPSPETICEMITDVVPEVESPSQM

SEQ ID NO: 808 - protein, 62 aa, synthetic construct
GPAPATAKVKPTPQLLPPTERPMSPRSLPQSPTHRGFAYVLPQPVEGEVGPAAPGPAPPPVP

SEQ ID NO: 809 - protein, 62 aa, synthetic construct
PPPEGEARKPAKPPVSPKPVLTQPVPKLQGSPTPTSKKVPLPGPGSPEVKRAHGTPPPVSPK

SEQ ID NO: 810 - protein, 62 aa, synthetic construct
PEGEARKPAKPPVSPKPVLTQPVPKLQGSPTPTSKKVPLPGPGSPEVKRAHGTPPPVSPKPP

SEQ ID NO: 811 - protein, 62 aa, synthetic construct
VAGLPSGSAGPSPAPSPARQPPAALAKPPGTPPSLGASPAKPPSPGAPALHVPAKPPRAAAA

SEQ ID NO: 812 - protein, 62 aa, synthetic construct
RLRSDGAAIPRRRSGGDTHSPPRGLGPSIDTPPRAAACPSSPHKIPLTRGRIESPEKRRMAT

SEQ ID NO: 813 - protein, 62 aa, synthetic construct
PPLMQTPIQGGIPAPGPIPAAVPGAGPGSLTPGGAMQPQLGMPGVGPVPLERGQVQMSDPRA

SEQ ID NO: 814 - protein, 62 aa, synthetic construct
TQPVGPINRPVGPGVLPVSPSVTPGVLQAVSPGVLSVSRAVPSGVLPAGQMTPAGQMTPAGV

SEQ ID NO: 815 - protein, 62 aa, synthetic construct
PKPKGLQALRPPQVTPPRKDAAPALGPLSSSPLATPSPSGTKARPVPPPDNAATPLPATLPP

SEQ ID NO: 816 - protein, 62 aa, synthetic construct
HSSSLTCQLATPLPLAPPSPSAPPSLQTLPSPPATPPSQVPPTQLIMSFPEAGVSSLATAAF

SEQ ID NO: 817 - protein, 62 aa, synthetic construct
ASVSPSVSSPLQSMPPTQANPALPSLPTLLSPLATPPLSAMSPLQGPVSPATSLGNSAFPLA

SEQ ID NO: 818 - protein, 62 aa, synthetic construct
LQGPVSPATSLGNSAFPLAALPQPGLSALTTPPPQASPSPSPPSLQATPHTLATLPLQDSPL

SEQ ID NO: 819 - protein, 62 aa, synthetic construct
ETPPCPAPCPLQAPPSPLTTPPPETPSSIATPPPQAPPALASPPLQGLPSPPLSPLATPPPQ

SEQ ID NO: 820 - protein, 62 aa, synthetic construct
ETPSSIATPPPQAPPALASPPLQGLPSPPLSPLATPPPQAPPALALPPLQAPPSPPASPPLS

SEQ ID NO: 821 - protein, 62 aa, synthetic construct
SIATPPPQAPPALASPPLQGLPSPPLSPLATPPPQAPPALALPPLQAPPSPPASPPLSPLAT

SEQ ID NO: 822 - protein, 62 aa, synthetic construct
PSPQAPNALAVHLLQAPFSPPPSPPVQAPFSPPASPPVSPSATPPSQAPPSLAAPPLQVPPS

SEQ ID NO: 823 - protein, 62 aa, synthetic construct
LAVHLLQAPFSPPPSPPVQAPFSPPASPPVSPSATPPSQAPPSLAAPPLQVPPSPPASPPMS

SEQ ID NO: 824 - protein, 62 aa, synthetic construct
PSATPPSQAPPSLAAPPLQVPPSPPASPPMSPSATPPPQAPPPLAAPPLQVPPSPPASPPMS

SEQ ID NO: 825 - protein, 62 aa, synthetic construct
PSATPPPQAPPPLAAPPLQVPPSPPASPPMSPSATPPPRVPPLLAAPPLQVPPSPPASLPMS

SEQ ID NO: 826 - protein, 62 aa, synthetic construct
PSATPPPRVPPLLAAPPLQVPPSPPASLPMSPLAKPPPQAPPALATPPLQALPSPPASFPGQ

SEQ ID NO: 827 - protein, 62 aa, synthetic construct
PPLQVPPSPPASLPMSPLAKPPPQAPPALATPPLQALPSPPASFPGQAPFSPSASLPMSPLA

SEQ ID NO: 828 - protein, 62 aa, synthetic construct
LATPPLQALPSPPASFPGQAPFSPSASLPMSPLATPPPQAPPVLAAPLLQVPPSPPASPTLQ

SEQ ID NO: 829 - protein, 62 aa, synthetic construct
APGHGAAADTRGLAAGPAALAAPAAPASPPSPQRSPPRSPEPGRYGLSPAGRGERQAADESR

SEQ ID NO: 830 - protein, 62 aa, synthetic construct
GGCYGAPLAEALRTAPPAAPLAGLYYGTLGTPGPYPGPLSPPPEAPPLESAEPLGPAADLWA

SEQ ID NO: 831 - protein, 62 aa, synthetic construct
EALRTAPPAAPLAGLYYGTLGTPGPYPGPLSPPPEAPPLESAEPLGPAADLWADVDLTEFDQ

SEQ ID NO: 832 - protein, 62 aa, synthetic construct
QKENADPRPPVQFPNLPRIDFSSIAVPGTSSPRQRQPPGTQQSHSSPGEITSSPQGLDNPAL

SEQ ID NO: 833 - protein, 62 aa, synthetic construct
CPEGAALPAALSCLSCLASFCPAHLGPHERSPALRGHRLVPPLRRLEESLCPRHLRPLERYC

SEQ ID NO: 834 - protein, 62 aa, synthetic construct
AHKVPPPWLIAMQRYGPPPSYPNLKIPGLNSPIPESCSFGYHAGGWGKPPVDETGKPLYGDV

SEQ ID NO: 835 - protein, 62 aa, synthetic construct
LLSDWDLSTAFATASKPYLQLRVDIRPSEDSPLLEDWDIISPKDVIGSDVLLAEKRSSLTTA

SEQ ID NO: 836 - protein, 62 aa, synthetic construct
SADGKPTTIITTTQASGAGTKPTILGISSVSPSTTKPGTTTIIKTIPMSAIITQAGATGVTS

SEQ ID NO: 837 - protein, 62 aa, synthetic construct
TPPGHGTLDNSKSMKPYNYCSAYESFYESTSPECASPQFEGPLSPPPINYNGIFSLKQEETL

SEQ ID NO: 838 - protein, 62 aa, synthetic construct
GTLDNSKSMKPYNYCSAYESFYESTSPECASPQFEGPLSPPPINYNGIFSLKQEETLDYGKN

SEQ ID NO: 839 - protein, 62 aa, synthetic construct
SRKLGPRSLSCLSDLDGGVALEPRACRPPGSPGRAPPPTPAPSGCDPRLRPIILRRARSLPS

SEQ ID NO: 840 - protein, 62 aa, synthetic construct
NFLCEMEEIPFNPVRSWLKHDSSQAPPSPFSPDASSPLLPMPAEFFHPAVSASQKGPEKGTG

SEQ ID NO: 841 - protein, 62 aa, synthetic construct
MEEIPFNPVRSWLKHDSSQAPPSPFSPDASSPLLPMPAEFFHPAVSASQKGPEKGTGTGTLP

SEQ ID NO: 842 - protein, 62 aa, synthetic construct
LLLGAPLAGPGVEARTPADRGPSPAPAPAASPQPGSRGPRDGLGPEPQEPPPGPPPSPAAAP

SEQ ID NO: 843 - protein, 62 aa, synthetic construct
PVPERVAGSPVTPLPEQEASPARPAGPTEESPPSAPLRPPEPPAGPPAPAPRPDERPSSPIP

SEQ ID NO: 844 - protein, 62 aa, synthetic construct
SLNFNRTLRLLMSQYGHFPFFRAYLGPHPASPHTPVIQIDQPEFDVPLKQDQEQKIYAQIFR

SEQ ID NO: 845 - protein, 62 aa, synthetic construct
ESPQLSKGSLLTILGSPSPERMGPADSLPPTPPSGTPSPGPPPALPLPPAPALLADGDWESR

SEQ ID NO: 846 - protein, 62 aa, synthetic construct
GSLLTILGSPSPERMGPADSLPPTPPSGTPSPGPPPALPLPPAPALLADGDWESREELRLRE

SEQ ID NO: 847 - protein, 62 aa, synthetic construct
TEIRGLLAQGLRPESPPPAGPLLNGAPAGESPQPKAAPEASSPPASPLQHLLPGKAVDLGPP

SEQ ID NO: 848 - protein, 62 aa, synthetic construct
EEEYLEQDVENVSIGLQTEARPSQGLPVIQSPPSSPPHRDSAYISSSPLGSHQVFDFRSSSS

SEQ ID NO: 849 - protein, 62 aa, synthetic construct
SSSQLGSPDVSHLIRRPISVNPNEIKPHPPTPRPLLHSQSVGLRFSPSSNSISSTSNLTPTF

SEQ ID NO: 850 - protein, 62 aa, synthetic construct
ASAPPRPAPGLEPQRGPAASPPQEPSSRPPSPPAGLSTEPAGPGTAPRPFLPGQPAEVDGNP

SEQ ID NO: 851 - protein, 62 aa, synthetic construct
PGTAPRPFLPGQPAEVDGNPPPAAPEAPAASPSTASPAPAAPGDLRQEHFDRLIRRSKLWCY

SEQ ID NO: 852 - protein, 62 aa, synthetic construct
RPFLPGQPAEVDGNPPPAAPEAPAASPSTASPAPAAPGDLRQEHFDRLIRRSKLWCYAKGFA

SEQ ID NO: 853 - protein, 62 aa, synthetic construct
GSTEFVDHDHFFDEDLQAAIDFFKLPPPLLSPVPSPPPMSSPHPGSLPSSFAPETYFGEYTD

SEQ ID NO: 854 - protein, 62 aa, synthetic construct
FFDEDLQAAIDFFKLPPPLLSPVPSPPPMSSPHPGSLPSSFAPETYFGEYTDSSDNDSVQLR

SEQ ID NO: 855 - protein, 62 aa, synthetic construct
PLISSSSPSSPASPVGQVSPFRETPVPPAMSPWPEDPRRASPPDPSPSPSAASASERVVPSP

SEQ ID NO: 856 - protein, 62 aa, synthetic construct
PASPVGQVSPFRETPVPPAMSPWPEDPRRASPPDPSPSPSAASASERVVPSPLQFCAATPKH

SEQ ID NO: 857 - protein, 62 aa, synthetic construct
GQVSPFRETPVPPAMSPWPEDPRRASPPDPSPSPSAASASERVVPSPLQFCAATPKHALPVP

SEQ ID NO: 858 - protein, 62 aa, synthetic construct
TSCLIRHMWRAHRAIVLQENGGTGIPPLYSTPPTLLPSLLPPEGELSSVSSSPVKPVRESPS

SEQ ID NO: 859 - protein, 62 aa, synthetic construct
ELKDAKTVLHQKSSRPPVPISNATKRSFLGSPAAGTLAELQPPVQLPAEGCHRHYLHPEEPE

SEQ ID NO: 860 - protein, 62 aa, synthetic construct
ELPHNVQEILGLAPPAEPHSPSPTASPLPLSPTRAPPTPPPSTDTAPQPDSSLEILPEEEDE

SEQ ID NO: 861 - protein, 62 aa, synthetic construct
LGFYDDAPPQDHFLTDPAFSEPADSTREGSSPALSTLFPPPRAPGSPRALNPQDYVATVADA

SEQ ID NO: 862 - protein, 62 aa, synthetic construct
ISHNSSLGYLGAVESKVSYPAPPQVPPTRYSPIPRHMLAEEDFTREPRKIILHKGSTGLGFN

SEQ ID NO: 863 - protein, 62 aa, synthetic construct
GAQSGPEGREAEESTGPEEAEAPESFPAAASPGDSATGHRRPPLGGRTVAEHVEAIEGSVQE

SEQ ID NO: 864 - protein, 62 aa, synthetic construct
MLASRSASLLKSYSQEAAIEQPVAPRPTALSPDYLSWTASSPYSTVPPYSPGSSGPATPGVN

SEQ ID NO: 865 - protein, 62 aa, synthetic construct
KSYSQEAAIEQPVAPRPTALSPDYLSWTASSPYSTVPPYSPGSSGPATPGVNMANSIASLRL

SEQ ID NO: 866 - protein, 62 aa, synthetic construct
EEAISAQKNAAPATPQPQPATIPASLPRPDSPYSRPHDSLPPPSPTTPVPAPRPRGQEGEYA

SEQ ID NO: 867 - protein, 62 aa, synthetic construct; identical to SEQ ID NO: 95

SEQ ID NO: 868 - protein, 62 aa, synthetic construct
QTEAPGLVPSLGSFGISRTPAPSAGSNAGSTPEAPTSSPATPATSSPTGASSAQQQLMQQMI

SEQ ID NO: 869 - protein, 62 aa, synthetic construct
ACLPPGDHNALYVNSFPLLDPSDAPFPSLDSPGKAIRGPQQPIWKPFPNQDSDSVVLSGTDS

SEQ ID NO: 870 - protein, 62 aa, synthetic construct
FGDPASSLFRWYKEAKPGAAEPEVGVPSSLSPSSPSSSWTETDVEERVYTPSNADIGLRLKL

SEQ ID NO: 871 - protein, 62 aa, synthetic construct
ASPLAANGQSPSPGSQSPVVPAGAVSTGSSSPGTPQPAPQLPLNAAPPSSVPPVPPSEALPP

SEQ ID NO: 872 - protein, 62 aa, synthetic construct
AVAPSKLLTSTTSTCLPPTNLPLGTVALPVTPVVTPGQVSTPVSTTTSGVKPGTAPSKPPLT

SEQ ID NO: 873 - protein, 62 aa, synthetic construct
RSQADLKKLPLEVTTRPSTEEPVRRPQRPRSPPLPAVIRNAPSRPPSLPTPRPASQPRKAPV

SEQ ID NO: 874 - protein, 62 aa, synthetic construct
GVSSHSSHVISAQSTSTLPTTPAPQPPTSSTPSTPFSDLLMCPQHRPLVFGLSCILQTILLC

SEQ ID NO: 875 - protein, 62 aa, synthetic construct
IDPSSSVLFEDMEKPDFSLFSPTMPCEGKGSPSPEKPDVEKEVKPPPKEKIEGTLGVLYDQP

SEQ ID NO: 876 - protein, 62 aa, synthetic construct
EKALSQLALRSAAPSSPGSPRPALPATPPATPPAASPSALKGVSQDLLERIRAKEAQKQLAQ

SEQ ID NO: 877 - protein, 62 aa, synthetic construct
LQSWTVQPSFEVISAQPQLLFLHPPVPSPVSPCHTGEKKSDSRNYLPILNSYTKIAPHPGKR

SEQ ID NO: 878 - protein, 62 aa, synthetic construct
ARDPYDLMGAALIPASPEAWAPYPLYTTELTPAISHAAFTYPTATAAAAALHAQVRWYPSSD

SEQ ID NO: 879 - protein, 62 aa, synthetic construct
ASGSSWGPSADPWSPIPSGTVLSRSQPWDLTPMLSSSEPWGRTPVLPAGPPTTDPWALNSPH

SEQ ID NO: 880 - protein, 62 aa, synthetic construct
LRCALGDRGRVRGRAAPYCVAELATGPSALSPLPPQADLDGPPGAGKQGIPQPLSGPCRRGW

SEQ ID NO: 881 - protein, 62 aa, synthetic construct
PQDNESDSDSSAQQQMLQAQPPALQAPTGVTPAPSSAPPGTPQLPTPGPTPSATAVPPQGSP

SEQ ID NO: 882 - protein, 62 aa, synthetic construct
SAQQQMLQAQPPALQAPTGVTPAPSSAPPGTPQLPTPGPTPSATAVPPQGSPTASQAPNQPQ

SEQ ID NO: 883 - protein, 62 aa, synthetic construct
MLQAQPPALQAPTGVTPAPSSAPPGTPQLPTPGPTPSATAVPPQGSPTASQAPNQPQAPTAP

SEQ ID NO: 884 - protein, 62 aa, synthetic construct
TPAPSSAPPGTPQLPTPGPTPSATAVPPQGSPTASQAPNQPQAPTAPVPHTHIQQAPALHPQ

SEQ ID NO: 885 - protein, 62 aa, synthetic construct
QSALQSQQPPREQPLPPAPLAMPHIKPPPTTPIPQLPAPQAHKHPPHLSGPSPFSMNANLPP

SEQ ID NO: 886 - protein, 62 aa, synthetic construct
RFPYPPGTLPNPLLGQPPHEHEMLRHPVFGTPYPRDLPGAIPPPMSAAHQLQAMHAQSAELQ

SEQ ID NO: 887 - protein, 62 aa, synthetic construct
YGEKCLYNYCAYDRKPPSGFKPLTPPTTPLSPTHQNPLFPPPQATLPTSGHAPAAGPVQGVG

SEQ ID NO: 888 - protein, 62 aa, synthetic construct
ASEEALSAVAPRDLEASSEPEPTPGAAKPETPQAPPLLPRRPPPRVPAIKKPTLRRTGKPLS

SEQ ID NO: 889 - protein, 62 aa, synthetic construct
TAQDLLSFELLDINIVQELERVPHNTPVDVTPCMSPLPHDSPLIEKPGLGQIEEENEGAGFK

SEQ ID NO: 890 - protein, 62 aa, synthetic construct
LDINIVQELERVPHNTPVDVTPCMSPLPHDSPLIEKPGLGQIEEENEGAGFKALPDSMVSVK

SEQ ID NO: 891 - protein, 62 aa, synthetic construct
QTLETVPLIPEVVELPPSLPRSSPCVHHHGSPGVDLPVTIPEVSSVPDQIRGEPRGSSGLVN

SEQ ID NO: 892 - protein, 62 aa, synthetic construct
TSHFTACGSLTRTLDSGIGTFPPPDHGSSGTPSKNLPKTKPPRLDPPPGVPPARPPPLTKVP

SEQ ID NO: 893 - protein, 62 aa, synthetic construct
PFKSNPQHRESWPGMGSGEAPTPLQPPEEVTPHPATPARRPPSPRRSHHPRRNSLDGGGRSR

SEQ ID NO: 894 - protein, 62 aa, synthetic construct
PQHRESWPGMGSGEAPTPLQPPEEVTPHPATPARRPPSPRRSHHPRRNSLDGGGRSRGAGSA

SEQ ID NO: 895 - protein, 62 aa, synthetic construct
AMSVGSSYENTSPAFSPLSSPASSGSCASHSPSGQEPGPSVPPLVPARSSSYHLALQPPQSR

SEQ ID NO: 896 - protein, 62 aa, synthetic construct
APASSSDPAAAAAATAAPGQTPASAQAPAQTPAPALPGPALPGPFPGGRVVRLHPVILASIV

SEQ ID NO: 897 - protein, 62 aa, synthetic construct
EEKMEAVPDVERKEDKPEGQSPVKAEWPSETPVLCQQCGGKPGVTFTSAKGEVFSVLEFAPS

SEQ ID NO: 898 - protein, 62 aa, synthetic construct
KQQQYKHQMLHHQRDGPPGLVPMELESPPESPPVPPGSYMPPSQSYMPPPQPPPSYYPPTSS

SEQ ID NO: 899 - protein, 62 aa, synthetic construct
PSQSYMPPPQPPPSYYPPTSSQPYLPPAQPSPSQSPPSQSYLAPTPSYSSSSSSSQSYLSHS

SEQ ID NO: 900 - protein, 62 aa, synthetic construct
GHKKGPVVAKDTPEPVKEEVTVPATSQVPESPSSEEPPLPPPNEEVPPPLPPEEPQSEDPEE

SEQ ID NO: 901 - protein, 62 aa, synthetic construct
SAGPPPVLPPPSLSSTAPPPVMPLPPLSSATPPPGIPPPGVPQGIPPQLTAAPVPPASSSQS

SEQ ID NO: 902 - protein, 62 aa, synthetic construct
EPSVTVPLRSMSDPDQDFDKEPDSDSTKHSTPSNSSNPSGPPSPNSPHRSQLPLEGLEQPAC

SEQ ID NO: 903 - protein, 62 aa, synthetic construct
AALGVLGPEVEKEAVSPRSEELSNEGDSQQSPGQQSPLPVEPEQGPAPLMVQLSLLRAETDR

SEQ ID NO: 904 - protein, 62 aa, synthetic construct
RGQDFLRASQMNLGMAAWGRLVMNLLPPCSSPSTISPPKGCPRTPTTLREASDPATPSNFLP

SEQ ID NO: 905 - protein, 62 aa, synthetic construct
LRASQMNLGMAAWGRLVMNLLPPCSSPSTISPPKGCPRTPTTLREASDPATPSNFLPKKTPL

SEQ ID NO: 906 - protein, 62 aa, synthetic construct
LPKKTPLGEEMTPPPKPPRLYLPQEPTSEETPRTKRPHMEPRTRRGPSPPASPTRKPPRLQD

SEQ ID NO: 907 - protein, 62 aa, synthetic construct
GKSNLKLPKGILKKKVSASAEGVQEDPPELSPIPASPGQAAPLLPKKGILKKPRQRESGYYS

SEQ ID NO: 908 - protein, 62 aa, synthetic construct
KLPKGILKKKVSASAEGVQEDPPELSPIPASPGQAAPLLPKKGILKKPRQRESGYYSSPEPS

SEQ ID NO: 909 - protein, 62 aa, synthetic construct
YEQLELHSLLDAELMRRPFDLPLQPLARSGSPCHQKPMPSLPQLEERGTENQFAEPFLQEKP

SEQ ID NO: 910 - protein, 62 aa, synthetic construct
SSEDEGVGPGPAGPKRPVFILGEPDPPPAATPVMPKPSSLSADTAALSHARLRSNSIGARHS

SEQ ID NO: 911 - protein, 62 aa, synthetic construct
LPGSPTHSLSPSPTTPCRSPAPDVPADTTASPPSASPSSSSPASPAAAGHTRPSSLHGLAAK

SEQ ID NO: 912 - protein, 62 aa, synthetic construct
THSLSPSPTTPCRSPAPDVPADTTASPPSASPSSSSPASPAAAGHTRPSSLHGLAAKLGPPR

SEQ ID NO: 913 - protein, 62 aa, synthetic construct
RPSSLHGLAAKLGPPRPKTGRRKSTSSIPPSPLACPPISAPPPRSPSPLPGHPPAPARSPRL

SEQ ID NO: 914 - protein, 62 aa, synthetic construct
PRPKTGRRKSTSSIPPSPLACPPISAPPPRSPSPLPGHPPAPARSPRLRRGQSADKLGTGER

SEQ ID NO: 915 - protein, 62 aa, synthetic construct
HRSWTAFSTSSSSPGTPLSPGNPFSPGTPISPGPIFPITSPPCHPSPSPFSPISSQVSSNPS

SEQ ID NO: 916 - protein, 62 aa, synthetic construct
TPLSPGNPFSPGTPISPGPIFPITSPPCHPSPSPFSPISSQVSSNPSPHPTSSPLPFSSSTP

SEQ ID NO: 917 - protein, 62 aa, synthetic construct
GNPFSPGTPISPGPIFPITSPPCHPSPSPFSPISSQVSSNPSPHPTSSPLPFSSSTPEFPVP

SEQ ID NO: 918 - protein, 62 aa, synthetic construct
SPSPFSPISSQVSSNPSPHPTSSPLPFSSSTPEFPVPLSQCPWSSLPTTSPPTFSPTCSQVT

SEQ ID NO: 919 - protein, 62 aa, synthetic construct
SAFSLAVMTVAQSLLSPSPGLLSQSPPAPPSPLPSLPLPPPVAPGGQESPSPHTAEVESEAS

SEQ ID NO: 920 - protein, 62 aa, synthetic construct
NTANPRGDTSHSPTPGKVSSPLSPLSPGIKSPTIPRAERGNPPPIPPKKPGLTPSPSATTPL

SEQ ID NO: 921 - protein, 62 aa, synthetic construct
KVKDKGREDKMKAPAPPLVLPPKELALPLFSPATASRVPAMLPSLLPVLPEKLFEEKEKVKE

SEQ ID NO: 922 - protein, 62 aa, synthetic construct
RVGAGQDKIVISKVVPAPEAKPAPSQNRPKTPPPAPAPAPGPMLVSPAPVPLPLLAQAAAGP

SEQ ID NO: 923 - protein, 62 aa, synthetic construct
PAPEAKPAPSQNRPKTPPPAPAPAPGPMLVSPAPVPLPLLAQAAAGPALLPSPGPAASGASA

SEQ ID NO: 924 - protein, 62 aa, synthetic construct
LIPPPEAFRDTQPEQCREASLPEGPGQQGHTPQLHTPSSSQEREQTPSEAMSQKAKETVSTR

SEQ ID NO: 925 - protein, 62 aa, synthetic construct
EAFRDTQPEQCREASLPEGPGQQGHTPQLHTPSSSQEREQTPSEAMSQKAKETVSTRYTQPQ

SEQ ID NO: 926 - protein, 62 aa, synthetic construct
ITTKTPSDEREKSTCSMGSELLPMISPRSPSPPLPTHIPPEPPRTPPFPAKTFQVVPEIEFP

SEQ ID NO: 927 - protein, 62 aa, synthetic construct
TLEGLDLDGEDWLPRELEEEGPQEQPEEEVTPGHEEEEPVAPSTVAPRWLEEEAALQLALHR

SEQ ID NO: 928 - protein, 62 aa, synthetic construct
GSCPIESEMQGAMGMEPLHRKAGSLDLNFTSPSRQAPLSMAAIRPEPKLLPRERYRVVVSYP

SEQ ID NO: 929 - protein, 62 aa, synthetic construct
RKKADTEGKSPSHSSSNRPFTPPTSTGGSKSPGSAGRSQTPPGVATPPIPKITIQIPKGTVM

SEQ ID NO: 930 - protein, 62 aa, synthetic construct
SNRPFTPPTSTGGSKSPGSAGRSQTPPGVATPPIPKITIQIPKGTVMVGKPSSHSQYTSSGS

SEQ ID NO: 931 - protein, 62 aa, synthetic construct
GLSSGSSSTKMKPQGKPSSLMNPSLSKPNISPSHSRPPGGSDKLASPMKPVPGTPPSSKAKS

SEQ ID NO: 932 - protein, 62 aa, synthetic construct
KPSSLMNPSLSKPNISPSHSRPPGGSDKLASPMKPVPGTPPSSKAKSPISSGSGGSHMSGTS

SEQ ID NO: 933 - protein, 62 aa, synthetic construct
GDQQLLKRVLVRKLCQPQSTGSLLGDPAASSPPGERGRSASPPQKRLQPPDFIDPLANKKPR

SEQ ID NO: 934 - protein, 62 aa, synthetic construct
LEDTGQDMLASFLRTNRQAAKLSKPTLENLTPVVLRPEIRKPEVLRPETPRPVDIGSGGFGD

SEQ ID NO: 935 - protein, 62 aa, synthetic construct
SRVSSSGLDSLGRYRSSCSLPPSLTTSTLASPSPPSSGHSTPRLAPPSPAREGTDKANHVPK

SEQ ID NO: 936 - protein, 62 aa, synthetic construct
DLLSCLLGPPEAASQGPPEDLLSEDPLLLASPAPPLSVQSTPRGGPPAAADPFGPLLPSSGN

SEQ ID NO: 937 - protein, 62 aa, synthetic construct
EAASQGPPEDLLSEDPLLLASPAPPLSVQSTPRGGPPAAADPFGPLLPSSGNNSQPCSNPDL

SEQ ID NO: 938 - protein, 62 aa, synthetic construct
APCGSQASWTKSQNPDPFADLGDLSSGLQGSPAGFPPGGFIPKTATTPKGSSSWQTSRPPAQ

SEQ ID NO: 939 - protein, 62 aa, synthetic construct
QAAPPTPTPPVPPAKKQPAFPASYIPPSPPTPPVPVPPPTLPKQQSFCAKPPPSPLSPVPSV

SEQ ID NO: 940 - protein, 62 aa, synthetic construct
SRVRPPRSGRSPAPRSPTGPNTPRAPGRFESPFSVEAILARPDPCAPAASQPSGSACVHPAF

SEQ ID NO: 941 - protein, 62 aa, synthetic construct
PRASRAAIVPLKDSLNHLNLPPLLVLPTRWSPTLGPDRHGAPEKLLGAERMPRAPGGFECFH

SEQ ID NO: 942 - protein, 62 aa, synthetic construct
IYGTHHNPTVWPDSKVYNPYRFDPDNPQQRSPLAYVPFSAGPRNCIGQSFAMAELRVVVALT

SEQ ID NO: 943 - protein, 62 aa, synthetic construct
EMNRMIPGSQRHMEPGNNPIFPRIPVEGPLSPSRGDFPKGIPPQMGPGRELEFGMVPSGMKG

SEQ ID NO: 944 - protein, 62 aa, synthetic construct
PGINPLKSPTMHQVQSPMLGSPSGNLKSPQTPSQLAGMLAGPAAAASIKSPPVLGSAAASPV

SEQ ID NO: 945 - protein, 62 aa, synthetic construct
AGMLAGPAAAASIKSPPVLGSAAASPVHLKSPSLPAPSPGWTSSPKPPLQSPGIPPNHKAPL

SEQ ID NO: 946 - protein, 62 aa, synthetic construct
ATPLPTARDRDADPTWTLRFSPSPPKSADASPAPGSPPAPAPTALATCIPEDRAPVRGPGSP

SEQ ID NO: 947 - protein, 62 aa, synthetic construct
GGMAGVKRASEDSEEEPSGKKAPVQAAKLPSPAPARKPPLSPAQTNPVVQRRNEGAGGPPPK

SEQ ID NO: 948 - protein, 62 aa, synthetic construct
KDSSKEQARNFLKQALSALEEAGAPAPGRPSPATAAVPSSQPKTEAPQASPLAKPLQSSSPR

SEQ ID NO: 949 - protein, 62 aa, synthetic construct
EEEKKPHLQGKPGRPLSPANVPALPGETVTSPVRLHPDYLSPEEIQRQLQDIERRLDALELR

SEQ ID NO: 950 - protein, 62 aa, synthetic construct
PQLLLNAQGQVIATLASSPLPPPVAVRKPSTPESPAKSEVQPIQPTPTVPQPAVVIASPAPA

SEQ ID NO: 951 - protein, 62 aa, synthetic construct
ASSPLPPPVAVRKPSTPESPAKSEVQPIQPTPTVPQPAVVIASPAPAAKPSASAPIPITCSE

SEQ ID NO: 952 - protein, 62 aa, synthetic construct
DAPSDLKAVHSPIRSQPVTLPEARTPVSPGSPQPQPPVAASTPPPSPLPICSQPQPSTEATV

SEQ ID NO: 953 - protein, 62 aa, synthetic construct
VFSLQSKEEQEPPILQPEIEIPSFKQGLSVSPFPKKRGRPKRQMRSPVKMKPPVLSVAPFVA

SEQ ID NO: 954 - protein, 62 aa, synthetic construct
DEDDVHQRPLPQPALLPMSSNTFPSRSTKPSPMNPLPSSHMPGAFSESNSSFPQSASLPPYF

SEQ ID NO: 955 - protein, 62 aa, synthetic construct
PLGALEPPLAGPHAADNPRFTDMISHPDTPSPEPGLPGTLHPMPGEVFSGGPSPPFPMSGTS

SEQ ID NO: 956 - protein, 62 aa, synthetic construct
EYAWVPPGLKPEQVYQFFSCLPEDKVPYVNSPGEKYRIKQLLHQLPPHDSEAQYCTALEEEE

SEQ ID NO: 957 - protein, 62 aa, synthetic construct
NSPSGRTVKSESPGVRRKRVSPVPFQSGRITPPRRAPSPDGFSPYSPEETNRRVNKVMRARL

SEQ ID NO: 958 - protein, 62 aa, synthetic construct
MVQTKGRPHSQCLNSSPLSHHSQLMFPALSTPSSSTPSVPAGTATDVSKHRLQGFIPCRIPS

SEQ ID NO: 959 - protein, 62 aa, synthetic construct
KLQSLLAKQPPTAAGRPVDASPRVPGGSPRTPNRSVSSNVASVSPIPAGSKKIDPNMKAGAT

SEQ ID NO: 960 - protein, 62 aa, synthetic construct
FDNTPLQALNLPTAYPALQGIPPVLLPGLNSPSLPGFTPSNTALTSPKPNLMGLPSTTVPSP

SEQ ID NO: 961 - protein, 62 aa, synthetic construct
LHPLNPCPLPGDSGICDLFESPSSGSDGAESPSAARGGSPLPGPAQPVAQLDLQTFRDYGQS

SEQ ID NO: 962 - protein, 62 aa, synthetic construct
SHSCTTPSTSSASGLNPTSAPPTSASAVPVSPVPQSPIPPLLQDPNLLRQLLPALQATLQLN

SEQ ID NO: 963 - protein, 62 aa, synthetic construct
SPRISTPQTNTVPIKPLISTPPVSSQPKVSTPVVKQGPVSQSATQQPVTADKQQGHEPVSPR

SEQ ID NO: 964 - protein, 62 aa, synthetic construct
LPTQQVRRSSRIKPPGPTAVPKRSSSVKNITPRKKGPNSGKKEKPLPVICSTSAASLKSLTR

SEQ ID NO: 965 - protein, 62 aa, synthetic construct
CGKTYRSKAGHDYHVRSEHTAPPPEEPTDKSPEAEDPLGVERTPSGRVRRTSAQVAVFHLQE

SEQ ID NO: 966 - protein, 62 aa, synthetic construct
AVTGVSSLTSKLIRSHPTTAPTETNIPQRPTPEGVPAPAPTPVPATPTTSGHWETQEEDKDT

SEQ ID NO: 967 - protein, 62 aa, synthetic construct
KLIRSHPTTAPTETNIPQRPTPEGVPAPAPTPVPATPTTSGHWETQEEDKDTAEDSSTADRW

SEQ ID NO: 968 - protein, 62 aa, synthetic construct
ISRASSTQQETSRASSTQEDTPRASSTQEDTPRASSTQWNTPRASSPSRSTQLDNPRTSSTQ

SEQ ID NO: 969 - protein, 62 aa, synthetic construct
AAYGAPLTSPEPSQPPCAVCIGHRDAPRASSPPRYLQHDPFPFFPEPRAPESEPPHHEPPYI

SEQ ID NO: 970 - protein, 62 aa, synthetic construct
RAPESEPPHHEPPYIPPAVCIGHRDAPRASSPPRHTQFDPFPFLPDTSDAEHQCQSPQHEPL

SEQ ID NO: 971 - protein, 62 aa, synthetic construct
AEHQCQSPQHEPLQLPAPVCIGYRDAPRASSPPRQAPEPSLLFQDLPRASTESLVPSMDSLH

SEQ ID NO: 972 - protein, 62 aa, synthetic construct
SLVPSMDSLHECPHIPTPVCIGHRDAPSFSSPPRQAPEPSLFFQDPPGTSMESLAPSTDSLH

SEQ ID NO: 973 - protein, 62 aa, synthetic construct
SLAPSTDSLHGSPVLIPQVCIGHRDAPRASSPPRHPPSDLAFLAPSPSPGSSGGSRGSAPPG

SEQ ID NO: 974 - protein, 62 aa, synthetic construct
LNNEPALPSTSYLPSTPSVVPASSYIPSSETPPAPSSREASRPPEEPSAPSPTLPAQFKQRA

SEQ ID NO: 975 - protein, 62 aa, synthetic construct
ASASRPQPAPADGADPPPAEEPEARPDGEGSPGKARPGTARRPGAAASGERDDRGPPASVAA

SEQ ID NO: 976 - protein, 62 aa, synthetic construct
VSNVVITKNVFEETSVKSEDEPPALPPKIGTPTRPCPLPPGKRSINKLDSPDPFKLNDPFQP

SEQ ID NO: 977 - protein, 62 aa, synthetic construct
LPPGKRSINKLDSPDPFKLNDPFQPFPGNDSPKEKDPEIFCDPFTSATTTTNKEADPSNFAN

SEQ ID NO: 978 - protein, 62 aa, synthetic construct
HSQQQSPTEKAGASGQPPSGPPGTGNEYGVSPRLPQGLPAHPRPVTAYDGFVQYIPFDDPRL

SEQ ID NO: 979 - protein, 62 aa, synthetic construct
QAAQLAGQRQSQQQYDPSTGPPVQNAASLHTPLPQLPGRLPPAGVPTAALSSALQFAQQPQV

SEQ ID NO: 980 - protein, 62 aa, synthetic construct
ESAFDEQKTEVLLDQPEIWGSGQPINPSMESPKLTRPFPTGTPPPLPPKNVPATPPRTGSPL

SEQ ID NO: 981 - protein, 62 aa, synthetic construct
GQCVVVFSQAPSGRAPLSPSLNSRPSPISATPPALVPETREYRSQSPVRSMDEAPCVNGRWG

SEQ ID NO: 982 - protein, 62 aa, synthetic construct
SPLALLAATCSKIGPPAVEAAVTPPAPPQPTPRKLVPIKPAPLPLSPGKNSFGILSSKGNIL

SEQ ID NO: 983 - protein, 62 aa, synthetic construct
PAVEAAVTPPAPPQPTPRKLVPIKPAPLPLSPGKNSFGILSSKGNILQIQGSQLSASYPGGQ

SEQ ID NO: 984 - protein, 62 aa, synthetic construct
PGSPGLPGPKGEPGKIVPLPGPPGAEGLPGSPGFPGPQGDRGFPGTPGRPGLPGEKGAVGQP

SEQ ID NO: 985 - protein, 62 aa, synthetic construct
IVPLPGPPGAEGLPGSPGFPGPQGDRGFPGTPGRPGLPGEKGAVGQPGIGFPGPPGPKGVDG

SEQ ID NO: 986 - protein, 62 aa, synthetic construct
VLNMRTPDTAKKTKSQTHRGSSPGPRPVEGTPASRTQDPSSPGTTPPQARQAPAPTVIRDPP

SEQ ID NO: 987 - protein, 62 aa, synthetic construct
KKTKSQTHRGSSPGPRPVEGTPASRTQDPSSPGTTPPQARQAPAPTVIRDPPSITPAVKSPL

SEQ ID NO: 988 - protein, 62 aa, synthetic construct
RSPAEPKGSALGPNPEPHLTFPRSFKVPPPTPVRTSSIPVQEAQEAPRKEEGATKKAPSRLP

SEQ ID NO: 989 - protein, 62 aa, synthetic construct
KNLPPQSTTLLPTTSLQPKAMLGPAIPPKATPEPAIPPKATLWPATPPKATLGPATPLKATS

SEQ ID NO: 990 - protein, 62 aa, synthetic construct
LQPKAMLGPAIPPKATPEPAIPPKATLWPATPPKATLGPATPLKATSGPTTPLKATSGPAIA

SEQ ID NO: 991 - protein, 62 aa, synthetic construct
SGASECESVSDKAPSPATLPATSSSLPSPATPSHGSPSSHGPPATHPTSPTPPSTASGATTA

SEQ ID NO: 992 - protein, 62 aa, synthetic construct
CESVSDKAPSPATLPATSSSLPSPATPSHGSPSSHGPPATHPTSPTPPSTASGATTAANGGS

SEQ ID NO: 993 - protein, 62 aa, synthetic construct
ATSSSLPSPATPSHGSPSSHGPPATHPTSPTPPSTASGATTAANGGSLNCLQTPSSTSRGRK

SEQ ID NO: 994 - protein, 62 aa, synthetic construct
GPALLTSVTPPLAPVVPAAPGPPSLAPSGASPSASALTLGLATAPSLSSSQTPGHPLLLAPT

SEQ ID NO: 995 - protein, 62 aa, synthetic construct
GAASTLVPGVSETSASPGSPSVRSMSGPESSPPIGGPCEAAPSSSLPTPPQQPFIARRHIEL

SEQ ID NO: 996 - protein, 62 aa, synthetic construct
IVADPVLEPQLIPGPQPLGPQPVHRPNPLLSPVEKRRRGRPPKARDLPIPGTISSAGDGNSE

SEQ ID NO: 997 - protein, 62 aa, synthetic construct
RMVPMNRTAKPFPGSVNQPATPFSPTRNMTSPIADFPAPPPYSAVTPPPDAFSRGVSSPIAG

SEQ ID NO: 998 - protein, 62 aa, synthetic construct
MKQALPPRPVNAASPTNVQASSVYSVPAYTSPPSFFAEASSPVSASPVPVGIPTSPKQESAS

SEQ ID NO: 999 - protein, 62 aa, synthetic construct
NAASPTNVQASSVYSVPAYTSPPSFFAEASSPVSASPVPVGIPTSPKQESASSSYFVAPRPK

SEQ ID NO: 1000 - protein, 62 aa, synthetic construct
ARALLLGHLARGLCVRERGEPCGQSRPPELSPSPQSPEGGAGPPAGPCHEPRCLCRQEALLH

SEQ ID NO: 1001 - protein, 62 aa, synthetic construct
LGHLARGLCVRERGEPCGQSRPPELSPSPQSPEGGAGPPAGPCHEPRCLCRQEALLHHVATI

SEQ ID NO: 1002 - protein, 62 aa, synthetic construct
LPRPPTTGGSEGAGAAPCPPNPANSWVPGLSPGGSRRPPRSPERTLSPSSGYSSQSGTPTLP

SEQ ID NO: 1003 - protein, 62 aa, synthetic construct
APSDRSGPQILTPLGDRFVIPPHPKVPAPFSPPPSKPRSPNPAAPALAAPAVVPGPVSTTDA

SEQ ID NO: 1004 - protein, 62 aa, synthetic construct
MADFPPPEEAFFSVASPEPAGPSGSPELVSSPAASSSSATALQIQPPGSPDPPPAPPAPAPA

SEQ ID NO: 1005 - protein, 62 aa, synthetic construct
SPETQADLQRNLVAELRSISEQRPPQAPKKSPKAPPPVARKPSVGVPPPASPSYPRAEPLTA

SEQ ID NO: 1006 - protein, 62 aa, synthetic construct
EQRPPQAPKKSPKAPPPVARKPSVGVPPPASPSYPRAEPLTAPPTNGLPHTQDRTKRELAEN

SEQ ID NO: 1007 - protein, 62 aa, synthetic construct
DEFNKSSATSGDIWPGLSAYDNSPRSPHSPSPIATPPSQSSSCSDAPMLSTVHSAKNTPSQH

SEQ ID NO: 1008 - protein, 62 aa, synthetic construct
KNTPSQHSHSIQHSPERSGSGSVGNGSSRYSPSQNSPIHHIPSRRSPAKTIAPQNAPRDESR

SEQ ID NO: 1009 - protein, 62 aa, synthetic construct
QHSHSIQHSPERSGSGSVGNGSSRYSPSQNSPIHHIPSRRSPAKTIAPQNAPRDESRGRSSF

SEQ ID NO: 1010 - protein, 62 aa, synthetic construct
ERSGSGSVGNGSSRYSPSQNSPIHHIPSRRSPAKTIAPQNAPRDESRGRSSFYPDGGDQETA

SEQ ID NO: 1011 - protein, 62 aa, synthetic construct
DYVKQRFQEGVDAKENPEEKVPEKPPTPKESPHFYRKGTTPPRSPEASPKHSHSPASSPKPL

SEQ ID NO: 1012 - protein, 62 aa, synthetic construct
YALKMNSPSQSSPGMNPGQPTSMLSPRHRMSPGVAGSPRIPPSQFSPAGSLHSPVGVCSSTG

SEQ ID NO: 1013 - protein, 62 aa, synthetic construct
AVAGNPFIQPDSPAPNPFSEEDEHPQQRLSSPLVPGNPFEEPTCINPFEMDSDSGPEAEEPI

SEQ ID NO: 1014 - protein, 62 aa, synthetic construct
LDSPTSGRPGVTSLTAAAAFKPVGSTGVIKSPSWQRPNQGVPSTGRISNSATYSGSVAPANS

SEQ ID NO: 1015 - protein, 62 aa, synthetic construct
RGHGPAQAGHHHPEKSQSLCEPAPLSGASASPSPAPPACSQPAPDHPSSAASKQPIVYPWMK

SEQ ID NO: 1016 - protein, 62 aa, synthetic construct
GSPRKAATDGADTPFGRSESAPTLHPYSPLSPKGRPSSPRTPLYLQPDAYGSLDRATSPRPR

SEQ ID NO: 1017 - protein, 62 aa, synthetic construct
LQPQPQPQPQPQSQPQPQLPPQPQTQPQTPTPAPQHPQQTWPPVNEGPPKPPTELEPEPEIE

SEQ ID NO: 1018 - protein, 62 aa, synthetic construct
HPQQTWPPVNEGPPKPPTELEPEPEIEGLLTPVLEAGDVDEGPVARPLSPTRLQPALPPEAQ

SEQ ID NO: 1019 - protein, 62 aa, synthetic construct
NRFVSVPNLSALESGGVGNGHPNRLDPIPNSPVHDIEFNSSKPLPQPVPPKGPKTFLSPAQS

SEQ ID NO: 1020 - protein, 62 aa, synthetic construct
YRALAAVPSAGSVQRVPSGAAGGKMAESPCSPSGQQPPSPPSPDELPANVKQAYRAFAAVPT

SEQ ID NO: 1021 - protein, 62 aa, synthetic construct
RGAWPSVTEMRKLFGGPGSRRPSADSESPGTPSPDGAAWEPPARESRQPPTPPPRTCFPLAG

SEQ ID NO: 1022 - protein, 62 aa, synthetic construct
IAVCSARILCIGAVPGLQPRCHREPPPSLRSPPETAPEPAGPELDVEAAADEEAATLAEPGP

SEQ ID NO: 1023 - protein, 62 aa, synthetic construct
SDSSSGLSQGPARPYHPPPLFPPSPQPPDSTPRQPEASFEPHPSVTPTGYHAPMEPPTSRMF

SEQ ID NO: 1024 - protein, 62 aa, synthetic construct
ASGPPLSATQIKQEPAEEYETPESPVPPARSPSPPPKVVDVPSHASQSARFNKHLDRGFNSC

SEQ ID NO: 1025 - protein, 62 aa, synthetic construct
KTEKFEADTDHRTTSFPGAESTAGSEPGSLTPDKEKPSQMTADNTQAAATKQPLETSEYTLS

SEQ ID NO: 1026 - protein, 62 aa, synthetic construct
YEGPGSPGASDPPTPQPPTGPPPRLPNGEPSPDPGGKGTPRNGSPPPGAPSSRFRVVKLPHG

SEQ ID NO: 1027 - protein, 62 aa, synthetic construct
ASDPPTPQPPTGPPPRLPNGEPSPDPGGKGTPRNGSPPPGAPSSRFRVVKLPHGLGEPYRRG

SEQ ID NO: 1028 - protein, 62 aa, synthetic construct
TPQPPTGPPPRLPNGEPSPDPGGKGTPRNGSPPPGAPSSRFRVVKLPHGLGEPYRRGRWTCV

SEQ ID NO: 1029 - protein, 62 aa, synthetic construct
HGTLPRKKKGPPPIRSCDDFSHMGTLPHSKSPRQNSPVTQDGIQESPWQDRHGETFTFRDPH

SEQ ID NO: 1030 - protein, 62 aa, synthetic construct
RKKKGPPPIRSCDDFSHMGTLPHSKSPRQNSPVTQDGIQESPWQDRHGETFTFRDPHLLDPT

SEQ ID NO: 1031 - protein, 62 aa, synthetic construct
LLVQFRNLSHNEPHMPQNATFPDSFHQPNNTPFPLSPNSPYPPSPASSTYPNSPASSGPGSP

SEQ ID NO: 1032 - protein, 62 aa, synthetic construct
RNLSHNEPHMPQNATFPDSFHQPNNTPFPLSPNSPYPPSPASSTYPNSPASSGPGSPFQLPA

SEQ ID NO: 1033 - protein, 62 aa, synthetic construct
KKQQQQQSAKQRNQILPSKKNVPTSPRTSPSPYAFSPVISDFYSSLPSQPLDPSNWAWNSTF

SEQ ID NO: 1034 - protein, 62 aa, synthetic construct
VLRPEPTKQPPYQLRPSLFVLSPIKEPAKVSPRAASPAKPSSLDLVPNLPKGALPPSPALPR

SEQ ID NO: 1035 - protein, 62 aa, synthetic construct
PTKQPPYQLRPSLFVLSPIKEPAKVSPRAASPAKPSSLDLVPNLPKGALPPSPALPRPSRSS

SEQ ID NO: 1036 - protein, 62 aa, synthetic construct
PEHQKIPCNSAEPKSIPALSMETQKLGSVLSPESPKPTPLTPLEPQKPGSVVSPELQTPLPS

SEQ ID NO: 1037 - protein, 62 aa, synthetic construct
SPEPPKSVPVCESQKLAPVPSPEPQKPAPVSPESVKATLSNPKPQKQSHFPETLGPPSASSP

SEQ ID NO: 1038 - protein, 62 aa, synthetic construct
KNPERKTVPLFPHPPVPSLSTSESKPPPQPSPPTSPVRTPLEVRLFPQLQTYVPYRPHPPQL

SEQ ID NO: 1039 - protein, 62 aa, synthetic construct
LEVRLFPQLQTYVPYRPHPPQLRKVTSPLQSPTKAKPKVEDEAPPRPPLPELYSPEDQPPAV

SEQ ID NO: 1040 - protein, 62 aa, synthetic construct
KVTSPLQSPTKAKPKVEDEAPPRPPLPELYSPEDQPPAVPPLPREATIIRHTSVRGLKRQSD

SEQ ID NO: 1041 - protein, 62 aa, synthetic construct
SQPNHVSSPPQALPPGTQMTGPLGPLPPMHSPQQPGYQPQQNGSFGPARGPQSNYGGPYPAA

SEQ ID NO: 1042 - protein, 62 aa, synthetic construct
QAPSAPETGGAGASEAPAPTGGEDGAGAETTPVAEPTKLVLPMKVNPYSVIDITPFQEDQPP

SEQ ID NO: 1043 - protein, 62 aa, synthetic construct
SEAGRKPWERSNSVEKPVSSILSRTPSVAKSPEAKSPLQSQPHSRMKPAGSVNDMALDAFDL

SEQ ID NO: 1044 - protein, 62 aa, synthetic construct
AERRASGAPSAGPEPAPRLAQPRRSLRSAQSPGAPPGPGLEDEVATPAAPRPGFPAVPREKP

SEQ ID NO: 1045 - protein, 62 aa, synthetic construct
APRLAQPRRSLRSAQSPGAPPGPGLEDEVATPAAPRPGFPAVPREKPKRRVSDSFFRPSVME

SEQ ID NO: 1046 - protein, 62 aa, synthetic construct
WPDATYGTGSASRASAVSELSPRERSPALKSPLQSVVVRRRSPRPSPVPKPSPPLSSTSQMG

SEQ ID NO: 1047 - protein, 62 aa, synthetic construct
VLSEGPGPSGVESLLCPMSSHLSLAQGESDTPGVGLVGDPGPSRAMPSGLSPGALDSDPVGL

SEQ ID NO: 1048 - protein, 62 aa, synthetic construct
DSTLANFLAEIDAITAPQPAAPVGASAPPPTPPRPEPKEAATSTLSSSTSNGTDSTQTSGWQ

SEQ ID NO: 1049 - protein, 62 aa, synthetic construct
EEAGSSEQPSPCPAPGPSLPVTLGPSGILESPMAPAPAATPEPPAQPLQGPVQLAVPIYSSA

SEQ ID NO: 1050 - protein, 62 aa, synthetic construct
ASATKDCSHREEKVTAGWPSEPGQGDLNPESPAALGQDLLEPRSKRPAHPILATADGASQLV

SEQ ID NO: 1051 - protein, 62 aa, synthetic construct
LKQPSLGPGCGPPGLPAAAAPASTGAPPGGSPYPASPLLGRPLYYTSPFYGNYTNYGNLNAA

SEQ ID NO: 1052 - protein, 62 aa, synthetic construct
LGPGCGPPGLPAAAAPASTGAPPGGSPYPASPLLGRPLYYTSPFYGNYTNYGNLNAALQGQG

SEQ ID NO: 1053 - protein, 62 aa, synthetic construct
DALKLVQLKQTGKITESRPTPAPTATPTAPSPLQATAGPSYPRPVIPPVSTPGQPNAVGTFT

SEQ ID NO: 1054 - protein, 62 aa, synthetic construct
PFSAGGVGRSHKPTPAPSPALPGSTDQLIASPHLAFPSTTGLLAAQCLGAARGLEATASPGL

SEQ ID NO: 1055 - protein, 62 aa, synthetic construct
PLSTQPPQGPPEAQLQPAPQPQVQRPPRPQSPTQLLHQNLPPVQAHPSAQSLSQPLSAYNSS

SEQ ID NO: 1056 - protein, 62 aa, synthetic construct
MSGSQELQWMVQPHFLGPSSYPRPLTYPQYSPPQPRPGVIRALGPPPGVRRRPCEQISPEEE

SEQ ID NO: 1057 - protein, 62 aa, synthetic construct
RPVPCISLSPGPVLEPEALHTPTLMTTPSLTPFTPSLVFTYPSTPEPCASAHRKSSSSSGDP

SEQ ID NO: 1058 - protein, 62 aa, synthetic construct
KPLREVAPDHFASSLASRVPLLDYGYPLMPTPTLLAPHAHHPLHKGDHHHPYFLTTSGMPVP

SEQ ID NO: 1059 - protein, 62 aa, synthetic construct
VSSGPCSQRSSPDGGLKGAAEGPPKRPGGSSPLNAVPCEGPPGSEPPRRPPPAPHDGDRKEL

SEQ ID NO: 1060 - protein, 62 aa, synthetic construct
PLSLLPVGPALQPPSLAVRPPPAPATRVLPSPARPFPASLGRAELHPVELKPFQDYQKLSSN

SEQ ID NO: 1061 - protein, 62 aa, synthetic construct
AEVFADSDDENLNTESPAGLHPLPRAGYLRSPSWTRTRAEQSHEKQPLGDPERQATVLDTFL

SEQ ID NO: 1062 - protein, 62 aa, synthetic construct
YSLVLMVLHYLQTLPEPILPSLQKIYPESFSPAIQLHLVHQAPCNVPPYLSKNESNLGDLLL

SEQ ID NO: 1063 - protein, 62 aa, synthetic construct
VVKVGIVEPSSATSGDSDDAAPSGSGTLSSTPPSASPAAKEASPTPPSSPSVSGGLSSPSQG

SEQ ID NO: 1064 - protein, 62 aa, synthetic construct
IVEPSSATSGDSDDAAPSGSGTLSSTPPSASPAAKEASPTPPSSPSVSGGLSSPSQGVGAEL

SEQ ID NO: 1065 - protein, 62 aa, synthetic construct
RASSDADHGAEEDKEEQVDSQPDASSSQTVTPVAEPPSTEPTQPDGPTTLGPLDLLPSEELL

SEQ ID NO: 1066 - protein, 62 aa, synthetic construct
KVQEFEHVNGRWSMPELAEVEENKKMSQPGSPSPKTPTPSTPGDTQPNTPAPVPPAEDGIKI

SEQ ID NO: 1067 - protein, 62 aa, synthetic construct
EHVNGRWSMPELAEVEENKKMSQPGSPSPKTPTPSTPGDTQPNTPAPVPPAEDGIKIEENSL

SEQ ID NO: 1068 - protein, 62 aa, synthetic construct
VNGRWSMPELAEVEENKKMSQPGSPSPKTPTPSTPGDTQPNTPAPVPPAEDGIKIEENSLKE

SEQ ID NO: 1069 - protein, 62 aa, synthetic construct
RWSMPELAEVEENKKMSQPGSPSPKTPTPSTPGDTQPNTPAPVPPAEDGIKIEENSLKEEES

SEQ ID NO: 1070 - protein, 62 aa, synthetic construct
ASSAAFRYTAGTPYKVPPTQSNTAPPPYSPSPNPYQTAMYPIRSAYPQQNLYAQGAYYTQPV

SEQ ID NO: 1071 - protein, 62 aa, synthetic construct
FYFSNLRPNGGQLAALPPISYPRGALPWAATPASCAPAQPAGATAFGGFSQPYLAGSGPLGL

SEQ ID NO: 1072 - protein, 62 aa, synthetic construct
PHSNSSGVLPLGLQPAPGLSKPLPSQVWQPSPDTWHPREQSCELSTCRQQLELIRLQMEQMQ

SEQ ID NO: 1073 - protein, 62 aa, synthetic construct
DDRSQGAIIADRPGLPGPEHSPSESQPSSPSPTPSPSPVLEPGSEPNLAVLSIPGDTMTTIQ

SEQ ID NO: 1074 - protein, 62 aa, synthetic construct
SPENVEDSGLDSPSHAAPGPSPDSWVPRPGTPQSPPSCRAPPPEARGIRAPPLPDSPQPLAS

SEQ ID NO: 1075 - protein, 62 aa, synthetic construct
QSPPSCRAPPPEARGIRAPPLPDSPQPLASSPGPWGLEALAGGDLMPAPADPTAREGLAAPP

SEQ ID NO: 1076 - protein, 62 aa, synthetic construct
LSYGSGPKRFPLVDVLQYALEFASSKPVCTSPVDDIDASSPPSGSIPSQTLPSTTEQQGALS

SEQ ID NO: 1077 - protein, 62 aa, synthetic construct
EQQTPEPEPGEAGRDGMGDSGRDSRSPDSSSPNPLPQGVPPPSPPGPPLPPSTAPSLGGSGA

SEQ ID NO: 1078 - protein, 62 aa, synthetic construct
MQKDPMEPPRFKINKKIPRGPPSPPAPVMHSPSRKMTVKEQQEWKIPPCISNWKNAKGYTIP

SEQ ID NO: 1079 - protein, 62 aa, synthetic construct
KKQNLKNNSKVFNDKLPNNEDRVRGSFAFDSPHHYTPIEGTPYCFSRNDSLSSLDFDDDDVD

SEQ ID NO: 1080 - protein, 62 aa, synthetic construct
SRGRTMIHIPGVRNSSSSTSPVSKKGPPLKTPASKSPSEGQTATTSPRGAKPSVKSELSPVA

SEQ ID NO: 1081 - protein, 62 aa, synthetic construct
MIHIPGVRNSSSSTSPVSKKGPPLKTPASKSPSEGQTATTSPRGAKPSVKSELSPVARQTSQ

SEQ ID NO: 1082 - protein, 62 aa, synthetic construct
SSSTSPVSKKGPPLKTPASKSPSEGQTATTSPRGAKPSVKSELSPVARQTSQIGGSSKAPSR

SEQ ID NO: 1083 - protein, 62 aa, synthetic construct
SQSQDDSIVGTRHCRHSLAIMPIPGTLSSSSPDLLQPTTSMLDFSNPSDIPDQVIRVFKVDQ

SEQ ID NO: 1084 - protein, 62 aa, synthetic construct
EPPLEPAEAQCLTAEVPGSPEPPPSPPKTTSPEPQESPTLPSTEGQVVNKLLSGPKETPAAQ

SEQ ID NO: 1085 - protein, 62 aa, synthetic construct
TGTLEVRVVGCRDLPETIPWNPTPSMGGPGTPDSRPPFLSRPARGLYSRSGSLSGRSSLKAE

SEQ ID NO: 1086 - protein, 62 aa, synthetic construct
FQVSPQPFLNRGDRIQVRKVPPLKIPVSRISPMPFHPSQVSPRARFPVSITSPNRTGARTLA

SEQ ID NO: 1087 - protein, 62 aa, synthetic construct
RGDRIQVRKVPPLKIPVSRISPMPFHPSQVSPRARFPVSITSPNRTGARTLADIKAKAQLVK

SEQ ID NO: 1088 - protein, 62 aa, synthetic construct
FSSTVLPLPADSPTHQPLLLPPLQTPKLYGSPTQIGPSYRGMINVSTSSDMDHNSAVPGSQV

SEQ ID NO: 1089 - protein, 62 aa, synthetic construct
NENIENEDLVAWVTVGFLHIPHSEDIPNTATPGNSVGFLLRPFNFFPEDPSLASRDTVIVWP

SEQ ID NO: 1090 - protein, 62 aa, synthetic construct
ISGNGQPRRRSIQDLTVTGTEPGQVSSRSSSPSVRMITTSGPTSEKPTRSHPWTPDDSTDTN

SEQ ID NO: 1091 - protein, 62 aa, synthetic construct
PLPGSQVFLQPLSSTPVSSRSPAPSSGMPSSPVPTPPPDASPIPAPGDPSEAEARLAESRRW

SEQ ID NO: 1092 - protein, 62 aa, synthetic construct
HSGKRGIPHSLSGLQDPIIARMSICSEDKKSPSECSLIASSPEENWPACQKAYNLNRTPSTV

SEQ ID NO: 1093 - protein, 62 aa, synthetic construct
FTSGEKEQVDEWTVETVEVVNSLQQQPQAASPSVPEPHSLTPVAQADPLVRRQRVQDLMAQM

SEQ ID NO: 1094 - protein, 62 aa, synthetic construct
EWTVETVEVVNSLQQQPQAASPSVPEPHSLTPVAQADPLVRRQRVQDLMAQMQGPYNFIQDS

SEQ ID NO: 1095 - protein, 62 aa, synthetic construct
PGQAGTSHDVKPFSQQTYAVQPPLPLPGFESPAGPAPSPSAPPAPPWQGRSVASSKLWMLEF

SEQ ID NO: 1096 - protein, 62 aa, synthetic construct
PVRPSAPLPFVPPPAVPSVPPLVTSMPPPVSPSTAAAFGNPPVSHFPPSTSAPNTLLPAPPS

SEQ ID NO: 1097 - protein, 62 aa, synthetic construct
SHGNASPARTPSAGASPAQASPAGTPPGRASPAQASPAQASPAGTPPGRASPAQASPAGTPP

SEQ ID NO: 1098 - protein, 62 aa, synthetic construct
SPARTPSAGASPAQASPAGTPPGRASPAQASPAQASPAGTPPGRASPAQASPAGTPPGRASP

SEQ ID NO: 1099 - protein, 62 aa, synthetic construct
PSAGASPAQASPAGTPPGRASPAQASPAQASPAGTPPGRASPAQASPAGTPPGRASPGRASP

SEQ ID NO: 1100 - protein, 62 aa, synthetic construct
SPAGTPPGRASPAQASPAQASPAGTPPGRASPAQASPAGTPPGRASPGRASPAQASPAQASP

SEQ ID NO: 1101 - protein, 62 aa, synthetic construct
PPGRASPAQASPAQASPAGTPPGRASPAQASPAGTPPGRASPGRASPAQASPAQASPARASP

SEQ ID NO: 1102 - protein, 62 aa, synthetic construct
SPAQASPAGTPPGRASPAQASPAGTPPGRASPGRASPAQASPAQASPARASPALASLSRSSS

SEQ ID NO: 1103 - protein, 62 aa, synthetic construct
SPAGTPPGRASPAQASPAGTPPGRASPGRASPAQASPAQASPARASPALASLSRSSSGRSSS

SEQ ID NO: 1104 - protein, 62 aa, synthetic construct
PPGRASPAQASPAGTPPGRASPGRASPAQASPAQASPARASPALASLSRSSSGRSSSARSAS

SEQ ID NO: 1105 - protein, 62 aa, synthetic construct
SPAQASPAGTPPGRASPGRASPAQASPAQASPARASPALASLSRSSSGRSSSARSASVTTSP

SEQ ID NO: 1106 - protein, 62 aa, synthetic construct
SPAGTPPGRASPGRASPAQASPAQASPARASPALASLSRSSSGRSSSARSASVTTSPTRVYL

SEQ ID NO: 1107 - protein, 62 aa, synthetic construct
SLSRSSSGRSSSARSASVTTSPTRVYLVRATPVGAVPIRSSPARSAPATRATRESPGTSLPK

SEQ ID NO: 1108 - protein, 62 aa, synthetic construct
SSARSASVTTSPTRVYLVRATPVGAVPIRSSPARSAPATRATRESPGTSLPKFTWREGQKQL

SEQ ID NO: 1109 - protein, 62 aa, synthetic construct
THSPASYHPTPSPMAYQASPSPSPVGYSPMTPGAPSPGGYNPHTPGSGIEQNSSDWVTTDIQ

SEQ ID NO: 1110 - protein, 62 aa, synthetic construct
SYHPTPSPMAYQASPSPSPVGYSPMTPGAPSPGGYNPHTPGSGIEQNSSDWVTTDIQVKVRD

SEQ ID NO: 1111 - protein, 62 aa, synthetic construct
ATAGVVYPGAIAMAGMPSPHLPSEHSSVSSSPEPGMPVIQSTYGVKGEEPHIKEEIQAEDIN

SEQ ID NO: 1112 - protein, 62 aa, synthetic construct
TWRCSSCLQATVQEVQPRAEEPRPQEPPVETPLPPGLRSAGEEVRGPPGEPLAGMDTTLVYK

SEQ ID NO: 1113 - protein, 62 aa, synthetic construct
HGGHPHGNMPGLDRPLSRQNPHDGVVTPAASPSLPQPGLQMPGQWGPVQGGPQPSGQHRSPC

SEQ ID NO: 1114 - protein, 62 aa, synthetic construct
PDGPLASPARVPMFPVPLPPGPLEPGPGCVTPGPALGFLEPSGPGLPPGVPPLQERRHLLQE

SEQ ID NO: 1115 - protein, 62 aa, synthetic construct
GTQRSEPALAPADFVAPLAPLPIPSNLFVPTPDAEEPQLPDGTGREGPAAARGLANPEPAPE

SEQ ID NO: 1116 - protein, 62 aa, synthetic construct
GDVLLMVAKLDPDSAKPEKTHPHDAPPCKTSPPATDTGKEKKGETSRTPCGSQASTEILAPK

SEQ ID NO: 1117 - protein, 62 aa, synthetic construct
NSVKVNPAAQPVSSPAQTSLQPGAKYPDVASPTLRRLFGGKPTKQVPIATAENMKNSVVISN

SEQ ID NO: 1118 - protein, 62 aa, synthetic construct
LEEAAKRQDGGLFKGPPYPGYPFIMIPDLTSPYLPNGSLSPTARTLHFQSGSTHYSAYKTIE

SEQ ID NO: 1119 - protein, 62 aa, synthetic construct
HFTPGNPPPHLPADVDPKTGIPRPPHPPDISPYYPLSPGTVGQIPHPLGWLVPQQGQPVYPI

SEQ ID NO: 1120 - protein, 62 aa, synthetic construct
TLSSLETVSTQELYSIPEDQEPEDQEPEEPTPAPWARLWALQDGFANLECVNDNYWFGRDKS

SEQ ID NO: 1121 - protein, 62 aa, synthetic construct
CIRDPALVHQRPAPPSTVTTAGVTPQPESLSPSGKEPAASSPSSNNTAATTAAIVPGSQLMP

SEQ ID NO: 1122 - protein, 62 aa, synthetic construct
RPAPPSTVTTAGVTPQPESLSPSGKEPAASSPSSNNTAATTAAIVPGSQLMPSKSPSTGTTE

SEQ ID NO: 1123 - protein, 62 aa, synthetic construct
LNDIIQLLVRPDPDHLPGTSTQIEAKPCSNSPPKVKKAPRVGPSNQPSTSARARLIDPGFGI

SEQ ID NO: 1124 - protein, 62 aa, synthetic construct
DSSLEVLATRFQGSVRTYTESQSSLRSSYSSPTSLSPRAGSPFSPPPSSSSLTGEAAISRSF

SEQ ID NO: 1125 - protein, 62 aa, synthetic construct
VLATRFQGSVRTYTESQSSLRSSYSSPTSLSPRAGSPFSPPPSSSSLTGEAAISRSFQSLAC

SEQ ID NO: 1126 - protein, 62 aa, synthetic construct
FQGSVRTYTESQSSLRSSYSSPTSLSPRAGSPFSPPPSSSSLTGEAAISRSFQSLACSPGLP

SEQ ID NO: 1127 - protein, 62 aa, synthetic construct
HNYLGLTNELFSHEIQPLRLFPSPGLPTRTSPVRGSKRMVSTSATDEPRETPGRPPDPTGAP

SEQ ID NO: 1128 - protein, 62 aa, synthetic construct
TQESTKEQTTFPPRWTPNFTLHMESITFSKTPKSTTEPTPSPTTSEPVPEPAPNMTTLEPTP

SEQ ID NO: 1129 - protein, 62 aa, synthetic construct
TPKSTTEPTPSPTTSEPVPEPAPNMTTLEPTPSPTTPEPTSEPAPSPTTPEPTSEPAPSPTT

SEQ ID NO: 1130 - protein, 62 aa, synthetic construct
TEPTPSPTTSEPVPEPAPNMTTLEPTPSPTTPEPTSEPAPSPTTPEPTSEPAPSPTTPEPTS

SEQ ID NO: 1131 - protein, 62 aa, synthetic construct
EPVPEPAPNMTTLEPTPSPTTPEPTSEPAPSPTTPEPTSEPAPSPTTPEPTSEPAPSPTTPE

SEQ ID NO: 1132 - protein, 62 aa, synthetic construct
PEPAPNMTTLEPTPSPTTPEPTSEPAPSPTTPEPTSEPAPSPTTPEPTSEPAPSPTTPEPTP

SEQ ID NO: 1133 - protein, 62 aa, synthetic construct
EPTPSPTTPEPTSEPAPSPTTPEPTSEPAPSPTTPEPTSEPAPSPTTPEPTPIPTIATSPTI

SEQ ID NO: 1134 - protein, 62 aa, synthetic construct
PSPTTPEPTSEPAPSPTTPEPTSEPAPSPTTPEPTSEPAPSPTTPEPTPIPTIATSPTILVS

SEQ ID NO: 1135 - protein, 62 aa, synthetic construct
EPAPSPTTPEPTSEPAPSPTTPEPTSEPAPSPTTPEPTPIPTIATSPTILVSATSLITPKST

SEQ ID NO: 1136 - protein, 62 aa, synthetic construct
FLPEEDTPIGAPDLGLPSLSWPRVSTDGLQTPATPESQNDFPVGKDSQSQLPPPWRDRTNEV

SEQ ID NO: 1137 - protein, 62 aa, synthetic construct
LDADDAAAVAAKCPRLSECSSPPDYLSPPGSPCSPQPPPAAPGAGGGSGSAPGPSRIADYLL

SEQ ID NO: 1138 - protein, 62 aa, synthetic construct
QNVVLMPVSTPKPPKRPRLQRPASTTVLSPSPPVQQPQFTVISPITITPVGQSFSMGNIPVA

SEQ ID NO: 1139 - protein, 62 aa, synthetic construct
LPRGLQVGQPNLVVCGHSEVLPAALAVYMQTPSQPLPTYDEVLLCTPATTFEEVALLLRRCL

SEQ ID NO: 1140 - protein, 62 aa, synthetic construct
ALSRKRKKEVDATSPAPSTSSTVKTEGAEATPGAQNPKTVAKCQVTPRRNVLQKRPVIVKVL

SEQ ID NO: 1141 - protein, 62 aa, synthetic construct
LKEGSHFPGPFMTSIGPAESHPHTPQMPPSTPSSSFLTTLKPRLKTEPEEVSIEDSAQSDLK

SEQ ID NO: 1142 - protein, 62 aa, synthetic construct
KAQKRKMEESDEEAVQAKVLRPLRSCDEPLTPPPHSPTSMLQLIHDPVSPRGMVTRSSPGAG

SEQ ID NO: 1143 - protein, 62 aa, synthetic construct
KMEESDEEAVQAKVLRPLRSCDEPLTPPPHSPTSMLQLIHDPVSPRGMVTRSSPGAGPSDHH

SEQ ID NO: 1144 - protein, 62 aa, synthetic construct
ASAILYAGFVEVPEESPKQPSEVNVNPLYVSPACKKPLIHMYEKEFTSEICCGSLWGVNLLL

SEQ ID NO: 1145 - protein, 62 aa, synthetic construct
SNWLKTLTEEGINNKKPWTCFPKPSNSQPTSPSLEDPAKSGVTAIRLCSSVVIEDPKKQTSV

SEQ ID NO: 1146 - protein, 62 aa, synthetic construct
STSPPPSPEVWADSRSPGIISQASAPRTTGTPRTSLPHFHHPETSRPDSNIYKKPPIYKQRE

SEQ ID NO: 1147 - protein, 62 aa, synthetic construct
TAVQNLAPRAAVAAAAPRAVAPYKYASSVRSPHPAIQPLQAPQPAVHVQGQEPLTASMLAAA

SEQ ID NO: 1148 - protein, 62 aa, synthetic construct
AAQDASAPPAPTGPAAPAAGPCDPDLLLFATPQAPRPTPSAPRPALGRPPVKRRLDLETDHQ

SEQ ID NO: 1149 - protein, 62 aa, synthetic construct
PPAPTGPAAPAAGPCDPDLLLFATPQAPRPTPSAPRPALGRPPVKRRLDLETDHQYLAESSG

SEQ ID NO: 1150 - protein, 62 aa, synthetic construct
GASCPELRPHVEPRPLPSFCPPRRLDQCPESPLQRCPPPAPRPRLRPEPCISLEPRPRPLPR

SEQ ID NO: 1151 - protein, 62 aa, synthetic construct
EEVQLVVEPEGGAVAPGGTVTLTCEVPAQPSPQIHWMKDGVPLPLPPSPVLILPEIGPQDQG

SEQ ID NO: 1152 - protein, 62 aa, synthetic construct
AAGAGTGGAGPAGRLLPPPAPGSPAAPAAVSPAAGQPRPPAPASRGPMPARIGYYEIDRTIG

SEQ ID NO: 1153 - protein, 62 aa, synthetic construct
GETSGAAICLPSVKPVVSSAGTTSDKPVIGTPVQIKLAQPGPVLSQPAGIPQAVQVKQLVVQ

SEQ ID NO: 1154 - protein, 62 aa, synthetic construct
PIMPYPPAAVYYAPAGPTSAQPAAKWPPTASPPPARRHRHSIQLDLGDLEELNKALSRAVQA

SEQ ID NO: 1155 - protein, 62 aa, synthetic construct
STAQPSGFNIGSAGNSAQPTAPATLPFTPATPAATTAGATQPAAPTPTATITSTGPSLFASI

SEQ ID NO: 1156 - protein, 62 aa, synthetic construct
RAGGGGRDAPEAAAQSPCSVPSQVPTPGFFSPAPRECLPPFLGVPKPGLYPLGPPSFQPSSP

SEQ ID NO: 1157 - protein, 62 aa, synthetic construct
TRSWSPFRSMPPDRLNASYGMLGQSPPLHRSPDFLLSYPPAPSCFPPDHLGYSAPQHPARRP

SEQ ID NO: 1158 - protein, 62 aa, synthetic construct
PARRPTPPEPLYVNLALGPRGPSPASSSSSSPPAHPRSRSDPGPPVPRLPQKQRAPWGPRTP

SEQ ID NO: 1159 - protein, 62 aa, synthetic construct
DVKPFSQTPFTLSLTPPSTDLPGYEPPQALSPLPPPTPSPPAWQARGLGTARLQLVEFSAFV

SEQ ID NO: 1160 - protein, 62 aa, synthetic construct
EEGGEPFQKKLQSGEPVELENPPLLPESTVSPQASTPISQSTPVFPPGSLPIPSQPQFSHDI

SEQ ID NO: 1161 - protein, 62 aa, synthetic construct
PFQKKLQSGEPVELENPPLLPESTVSPQASTPISQSTPVFPPGSLPIPSQPQFSHDIFIPSP

SEQ ID NO: 1162 - protein, 62 aa, synthetic construct
LERRKEGSLPRPSAGLPSRQRPTLLPATGSTPQPGSSQQIQQRISVPPSPTYPPAGPPAFPA

SEQ ID NO: 1163 - protein, 62 aa, synthetic construct
PSESTEKEPEQDGPAAPADGSTVESLPRPLSPTKLTPIVHSPLRYQSDADLEALRRKLANAP

SEQ ID NO: 1164 - protein, 62 aa, synthetic construct
EKEPEQDGPAAPADGSTVESLPRPLSPTKLTPIVHSPLRYQSDADLEALRRKLANAPRPLKK

SEQ ID NO: 1165 - protein, 62 aa, synthetic construct
QDGPAAPADGSTVESLPRPLSPTKLTPIVHSPLRYQSDADLEALRRKLANAPRPLKKRSSIT

SEQ ID NO: 1166 - protein, 62 aa, synthetic construct
QEMELVKAALAEALRLLRLQVPPSSLQGSGTPAPPGDSLAAPPGLPPTCTPSLVSRGTQTET

SEQ ID NO: 1167 - protein, 62 aa, synthetic construct
SEGGGSSSSGAGSPGPPGILRPLQPPQRADTPRRNSSSSSSPSERPRQKLSRKAISSANLLV

SEQ ID NO: 1168 - protein, 62 aa, synthetic construct
SLSYDSLLNPGSPGGHACPAHPAVGVAGYHSPYLHPGATGDPPRPLPRSFSPVLGPRPREPS

SEQ ID NO: 1169 - protein, 62 aa, synthetic construct
QLNASEQLPRAYHRPLGAVPRPRARSFHGLSPPALEPSLLPRWGSDPRLSCSSPSRGDPSAS

SEQ ID NO: 1170 - protein, 62 aa, synthetic construct
ARRVKGIEAAKTRGREPGVREPGDPAPPGSTPTNGDGVAPRPVSMENGLGPAPGSPEKQPGS

SEQ ID NO: 1171 - protein, 62 aa, synthetic construct
TFSKELPKSLAGGLLPSPLAVAAVMAAAAGSPLSLRPAPAAPLLQGPPITHPLLHPAPGPIR

SEQ ID NO: 1172 - protein, 62 aa, synthetic construct
ATTTTATVPTTRPVVREPTALSSSLAPTWLSPTEPATEAPSPPSTAPPTVGPVPQPQDCPPS

SEQ ID NO: 1173 - protein, 62 aa, synthetic construct
TRPVVREPTALSSSLAPTWLSPTEPATEAPSPPSTAPPTVGPVPQPQDCPPSTCLNGGTCHL

SEQ ID NO: 1174 - protein, 62 aa, synthetic construct
CFPDISAPASSASYSHGQPAMPGSSGVHHLSPPGGGPSPGRHGPLPPPGYGTPLNCNNNNGM

SEQ ID NO: 1175 - protein, 62 aa, synthetic construct
PTRAPSPPWPPQGPLSPGPGSLPLSIARVQTPPWHPPGAPSPGLLQDSDSLSGSYLDPNYQS

SEQ ID NO: 1176 - protein, 62 aa, synthetic construct
RRRIDLNLDISPQRPRPTLQLPLANDGGSRSPSSESSPQHPTPPARPRHMLGLPSTLFTPRS

SEQ ID NO: 1177 - protein, 62 aa, synthetic construct
VVKTPPAGAQGADTLTYTLGLPDGQLPLGSSPDLPEASACPPGLLKASGSGPSYSNNLAKAG

SEQ ID NO: 1178 - protein, 62 aa, synthetic construct
SQLRSPRVLGDHLLLDPTHELPPYTPPPMLSPVRQGSGLFSNVLISGHGPGAHPQLPLTPLT

SEQ ID NO: 1179 - protein, 62 aa, synthetic construct
TSTTSSRNARRRESEKSLENETLNKEEDCHSPTSKPPKPDQPLKVMPAPPPKENAWVKRSSN

SEQ ID NO: 1180 - protein, 62 aa, synthetic construct
RAGASLARGPQPDRTHPSAAVPVCPRSASASPLTPCSVTRSVHRCAPAGERGERRKPNAGGS

SEQ ID NO: 1181 - protein, 62 aa, synthetic construct
GPEDKSQSKRRASNEKESAAPASPAPSPAPSPTPAPPQKEQPPAETPTDAAVLTSPPAPAPP

SEQ ID NO: 1182 - protein, 62 aa, synthetic construct
KESAAPASPAPSPAPSPTPAPPQKEQPPAETPTDAAVLTSPPAPAPPVTPSKPMAGTTDREE

SEQ ID NO: 1183 - protein, 62 aa, synthetic construct
ASPHHSSSGEEKAKSSWFGLREAKDPTQKPSPHPVKPLSAAPVEGSPDRKQSRSSLSIALSS

SEQ ID NO: 1184 - protein, 62 aa, synthetic construct
SWFGLREAKDPTQKPSPHPVKPLSAAPVEGSPDRKQSRSSLSIALSSGLEKLKTVTSGSIQP

SEQ ID NO: 1185 - protein, 62 aa, synthetic construct
LSEPRMFAPFPSPVLPSNLSRGMSIYPGYMSPHAGYPAGGLLRSQVPPFDSHEVAEVGFSSN

SEQ ID NO: 1186 - protein, 62 aa, synthetic construct
CPSGTLSDSGRNSLSSLPTYSTGGAEPTTSSPGGHLPSHGSGRGALPGPARGVPTGPSHSDS

SEQ ID NO: 1187 - protein, 62 aa, synthetic construct
SGSPGTPQALPRRLVGSSLRAPTVPPPLPPTPPQPARRQSRRSPASPSPASPGPASPSPVSL

SEQ ID NO: 1188 - protein, 62 aa, synthetic construct
RLVGSSLRAPTVPPPLPPTPPQPARRQSRRSPASPSPASPGPASPSPVSLSNPAQVDLGAAT

SEQ ID NO: 1189 - protein, 62 aa, synthetic construct
GSSLRAPTVPPPLPPTPPQPARRQSRRSPASPSPASPGPASPSPVSLSNPAQVDLGAATAEG

SEQ ID NO: 1190 - protein, 62 aa, synthetic construct
SLRAPTVPPPLPPTPPQPARRQSRRSPASPSPASPGPASPSPVSLSNPAQVDLGAATAEGGA

SEQ ID NO: 1191 - protein, 62 aa, synthetic construct
LPPTPPQPARRQSRRSPASPSPASPGPASPSPVSLSNPAQVDLGAATAEGGAPEAISGVPTP

SEQ ID NO: 1192 - protein, 62 aa, synthetic construct
DHPDIHPAGWCSKTGHPLQPPLGPREPSSASPGGCPPLSYRSLPHTRTSKYSFHHRKCPTPG

SEQ ID NO: 1193 - protein, 62 aa, synthetic construct
ARQAGWQDVLTRLYVLEAATAGSPPPSSPESPTSPKPAPPKPPTESPAEPSDVFLPSEAPCP

SEQ ID NO: 1194 - protein, 62 aa, synthetic construct
AGWQDVLTRLYVLEAATAGSPPPSSPESPTSPKPAPPKPPTESPAEPSDVFLPSEAPCPDPD

SEQ ID NO: 1195 - protein, 62 aa, synthetic construct
LEAATAGSPPPSSPESPTSPKPAPPKPPTESPAEPSDVFLPSEAPCPDPDGFYHALSPFCTP

SEQ ID NO: 1196 - protein, 62 aa, synthetic construct
EQWFTEDPGPDEAPRMPEAAPPVAPAPAAPTPAAPAPAPSWPLSSSVPSQKTYQGSYGFRLG

SEQ ID NO: 1197 - protein, 62 aa, synthetic construct
LSAKLAREKSSSPSGSPGDPSSPTSSVSPGSPPSSPRSRDAPAGSPPASPGPQGPSTKLPLS

SEQ ID NO: 1198 - protein, 62 aa, synthetic construct
TPKAETTTKGPALTTPKEPTPTTPKEPASTTPKEPTPTTIKSAPTTPKEPAPTTTKSAPTTP

SEQ ID NO: 1199 - protein, 62 aa, synthetic construct
TTTKGPALTTPKEPTPTTPKEPASTTPKEPTPTTIKSAPTTPKEPAPTTTKSAPTTPKEPAP

SEQ ID NO: 1200 - protein, 62 aa, synthetic construct
PKEPTPTTPKEPASTTPKEPTPTTIKSAPTTPKEPAPTTTKSAPTTPKEPAPTTTKEPAPTT

SEQ ID NO: 1201 - protein, 62 aa, synthetic construct
TPKEPTPTTIKSAPTTPKEPAPTTTKSAPTTPKEPAPTTTKEPAPTTPKEPAPTTTKEPAPT

SEQ ID NO: 1202 - protein, 62 aa, synthetic construct
TTPKEPAPTTPKKPAPTTPKEPAPTTPKEPTPTTPKEPAPTTKEPAPTTPKEPAPTAPKKPA

SEQ ID NO: 1203 - protein, 62 aa, synthetic construct
KEPAPTTPKKPAPTTPKEPAPTTPKEPTPTTPKEPAPTTKEPAPTTPKEPAPTAPKKPAPTT

SEQ ID NO: 1204 - protein, 62 aa, synthetic construct
PKEPAPTTPKEPTPTTPKEPAPTTKEPAPTTPKEPAPTAPKKPAPTTPKEPAPTTPKEPAPT

SEQ ID NO: 1205 - protein, 62 aa, synthetic construct
KEPAPTTPKETAPTTPKGTAPTTLKEPAPTTPKKPAPKELAPTTTKEPTSTTSDKPAPTTPK

SEQ ID NO: 1206 - protein, 62 aa, synthetic construct
KEPAPTTPKEPAPTTPKGTAPTTLKEPAPTTPKKPAPKELAPTTTKGPTSTTSDKPAPTTPK

SEQ ID NO: 1207 - protein, 62 aa, synthetic construct
AGLASPSSGYSSQSETPTSSFPTAFFSGPLSPGGSKRKPKVPERKSSLQQPSLKDGTISLSK

SEQ ID NO: 1208 - protein, 62 aa, synthetic construct
SAQTAEIFQALQQECMRQLQAPAGSPAPSPSPGGDDKPQVPPRVPIPPRPTRPHVQLSPAPP

SEQ ID NO: 1209 - protein, 62 aa, synthetic construct
PIPPRPTRPHVQLSPAPPGEEETSQWPGPASPPRVPPREPLSPQGSRTPSPLVPPGSSPLPP

SEQ ID NO: 1210 - protein, 62 aa, synthetic construct
STHYYLLPERPSYLERYQRFLREAQSPEEPTPLPVPLLLPPPSTPAPAAPTATVRPMPQAAL

SEQ ID NO: 1211 - protein, 62 aa, synthetic construct
LERYQRFLREAQSPEEPTPLPVPLLLPPPSTPAPAAPTATVRPMPQAALDPKANFSTNNSNP

SEQ ID NO: 1212 - protein, 62 aa, synthetic construct
KPLGKAGVQLEPQLEAPLNEEMPLLPPPEESPLSPPPEESPTSPPPEASRLSPPPEELPASP

SEQ ID NO: 1213 - protein, 62 aa, synthetic construct
LEPQLEAPLNEEMPLLPPPEESPLSPPPEESPTSPPPEASRLSPPPEELPASPLPEALHLSR

SEQ ID NO: 1214 - protein, 62 aa, synthetic construct
PEASRLSPPPEELPASPLPEALHLSRPLEESPLSPPPEESPLSPPPESSPFSPLEESPLSPP

SEQ ID NO: 1215 - protein, 62 aa, synthetic construct
PESSPFSPLEESPLSPPEESPPSPALETPLSPPPEASPLSPPFEESPLSPPPEELPTSPPPE

SEQ ID NO: 1216 - protein, 62 aa, synthetic construct
PPEESPPSPALETPLSPPPEASPLSPPFEESPLSPPPEELPTSPPPEASRLSPPPEESPMSP

SEQ ID NO: 1217 - protein, 62 aa, synthetic construct
FEESPLSPPPEELPTSPPPEASRLSPPPEESPMSPPPEESPMSPPPEASRLFPPFEESPLSP

SEQ ID NO: 1218 - protein, 62 aa, synthetic construct
PEELPTSPPPEASRLSPPPEESPMSPPPEESPMSPPPEASRLFPPFEESPLSPPPEESPLSP

SEQ ID NO: 1219 - protein, 62 aa, synthetic construct
PEESPMSPPPEESPMSPPPEASRLFPPFEESPLSPPPEESPLSPPPEASRLSPPPEDSPMSP

SEQ ID NO: 1220 - protein, 62 aa, synthetic construct
PEESPMSPPPEASRLFPPFEESPLSPPPEESPLSPPPEASRLSPPPEDSPMSPPPEESPMSP

SEQ ID NO: 1221 - protein, 62 aa, synthetic construct
FEESPLSPPPEESPLSPPPEASRLSPPPEDSPMSPPPEESPMSPPPEVSRLSPLPVVSRLSP

SEQ ID NO: 1222 - protein, 62 aa, synthetic construct
PEESPLSPPPEASRLSPPPEDSPMSPPPEESPMSPPPEVSRLSPLPVVSRLSPPPEESPLSP

SEQ ID NO: 1223 - protein, 62 aa, synthetic construct
PEESPMSPPPEVSRLSPLPVVSRLSPPPEESPLSPPPEESPTSPPPEASRLSPPPEDSPTSP

SEQ ID NO: 1224 - protein, 62 aa, synthetic construct
PEVSRLSPLPVVSRLSPPPEESPLSPPPEESPTSPPPEASRLSPPPEDSPTSPPPEDSPASP

SEQ ID NO: 1225 - protein, 62 aa, synthetic construct
PEESPLSPPPEESPTSPPPEASRLSPPPEDSPTSPPPEDSPASPPPEDSLMSLPLEESPLLP

SEQ ID NO: 1226 - protein, 62 aa, synthetic construct
PEESPTSPPPEASRLSPPPEDSPTSPPPEDSPASPPPEDSLMSLPLEESPLLPLPEEPQLCP

SEQ ID NO: 1227 - protein, 62 aa, synthetic construct
PEDSPTSPPPEDSPASPPPEDSLMSLPLEESPLLPLPEEPQLCPRSEGPHLSPRPEEPHLSP

SEQ ID NO: 1228 - protein, 62 aa, synthetic construct
GEPALSEPGEPPLSPLPEELPLSPSGEPSLSPQLMPPDPLPPPLSPIITAAAPPALSPLGEL

SEQ ID NO: 1229 - protein, 62 aa, synthetic construct
ILETPISPPPEANCTDPEPVPPMILPPSPGSPVGPASPILMEPLPPQCSPLLQHSLVPQNSP

SEQ ID NO: 1230 - protein, 62 aa, synthetic construct
SPILMEPLPPQCSPLLQHSLVPQNSPPSQCSPPALPLSVPSPLSPIGKVVGVSDEAELHEME

SEQ ID NO: 1231 - protein, 62 aa, synthetic construct
DTAPLDGIDAPGSQPEPGQTPGSLASELKGSPVLLDPEELAPVTPMEVYPECKQTAGQGSPC

SEQ ID NO: 1232 - protein, 62 aa, synthetic construct
CALPPRSLPSDPFSRVPASPQSQSSSQSPLTPRPLSAEAFCPSPVTPRFQSPDPYSRPPSRP

SEQ ID NO: 1233 - protein, 62 aa, synthetic construct
FSRVPASPQSQSSSQSPLTPRPLSAEAFCPSPVTPRFQSPDPYSRPPSRPQSRDPFAPLHKP

SEQ ID NO: 1234 - protein, 62 aa, synthetic construct
VPASPQSQSSSQSPLTPRPLSAEAFCPSPVTPRFQSPDPYSRPPSRPQSRDPFAPLHKPPRP

SEQ ID NO: 1235 - protein, 62 aa, synthetic construct
QSQSSSQSPLTPRPLSAEAFCPSPVTPRFQSPDPYSRPPSRPQSRDPFAPLHKPPRPQPPEV

SEQ ID NO: 1236 - protein, 62 aa, synthetic construct
GAGPRPQGPPRLPAPPGALSTGPVLGPVHPTPPPSSPQEPKRPSQLPSPSSQLPTEAQLPPT

SEQ ID NO: 1237 - protein, 62 aa, synthetic construct
PQGPPRLPAPPGALSTGPVLGPVHPTPPPSSPQEPKRPSQLPSPSSQLPTEAQLPPTHPGTP

SEQ ID NO: 1238 - protein, 62 aa, synthetic construct
ALSTGPVLGPVHPTPPPSSPQEPKRPSQLPSPSSQLPTEAQLPPTHPGTPKPQGPTLEPPPG

SEQ ID NO: 1239 - protein, 62 aa, synthetic construct
YTYNVSNLDVRQLSAPPPEEPSPPPSPLAPSPASPPTEPLVELPTEPLAEPPVPSPLPLASS

SEQ ID NO: 1240 - protein, 62 aa, synthetic construct
RFYSGDQPPSYLGASVDKLHHPLEFADKSPTPPNLPSDKIYPPSGSPEENTSTATMTYMTTT

SEQ ID NO: 1241 - protein, 62 aa, synthetic construct
EKPYPCDVCGQRFRFSNMLKAHKEKCFRVTSPVNVPPAVQIPLTTSPATPVPSVVNTATTPT

SEQ ID NO: 1242 - protein, 62 aa, synthetic construct
SNMLKAHKEKCFRVTSPVNVPPAVQIPLTTSPATPVPSVVNTATTPTPPINMNPVSTLPPRP

SEQ ID NO: 1243 - protein, 62 aa, synthetic construct
SYGGAVPSYCPAYGRVPHSCGSPGEGRGYPSPGAHSPRAGSISPGSPPYPQSRKLSYEIPTE

SEQ ID NO: 1244 - protein, 62 aa, synthetic construct
ASSELSGPSTPLHTSSPVQGKESTRRQDTRSPTSAPTQRLSPGEALPPVSQAGTGKAPELPS

SEQ ID NO: 1245 - protein, 62 aa, synthetic construct
PGEALPPVSQAGTGKAPELPSGSGPEPLAPSPVSPTFPPSSPSDWPQERSPGGHSDGASPRS

SEQ ID NO: 1246 - protein, 62 aa, synthetic construct
ALPPVSQAGTGKAPELPSGSGPEPLAPSPVSPTFPPSSPSDWPQERSPGGHSDGASPRSPVP

SEQ ID NO: 1247 - protein, 62 aa, synthetic construct
SPRSPVPTTLPGLRHAPWQGPRGPPDSPDGSPLTPVPSQMPWLVASPEPPQSSPTPAFPLAA

SEQ ID NO: 1248 - protein, 62 aa, synthetic construct
SLSALVSQHSISPISLPCCLRIPSKDPLEETPEAPVPTNMSTAADLLRQGAACSVLYLTSVE

SEQ ID NO: 1249 - protein, 62 aa, synthetic construct
LPSPVWETHTDAGTGRPYYYNPDTGVTTWESPFEAAEGAASPATSPASVDSHVSLETEWGQY

SEQ ID NO: 1250 - protein, 62 aa, synthetic construct
WEDEAENEPEEELEMQPGLSPGSPGDPRPPTPETDYPESLTSYPEEDYSPVGSFGEPGPTSP

SEQ ID NO: 1251 - protein, 62 aa, synthetic construct
RSAEAQPEAGSGAGGSGPAISRLQAAPAGPSPLLDGPSPPAPLHWPGTASPNEDAGDAAQGA

SEQ ID NO: 1252 - protein, 62 aa, synthetic construct
GPGGGEDEARGAGPPGSALPAPEAPGPGTASPVVPPTEDFLPLPTGFLQVPRGLTDLEIGMY

SEQ ID NO: 1253 - protein, 62 aa, synthetic construct
DYLFNKSLEIEPRNPKPLPRFPKKYSYPLKSPGVRPSNPRPGTMRHPTPLQQEPRKISYSRI

SEQ ID NO: 1254 - protein, 62 aa, synthetic construct
PSPRPGPGLLLDVCTKDLADAPAEELQEKGSPAGPPPSQGQPAARPPKEVPASRLAQQLREE

SEQ ID NO: 1255 - protein, 62 aa, synthetic construct
EEPSAKRTCPSLSPTSPLNNKGILSLPHQASPVSRTPSLPAVDTSYINTSLIQDYRHPFHMT

SEQ ID NO: 1256 - protein, 62 aa, synthetic construct
AGDIPGNTQESTEEKIELLTTEVPLALEEESPSEGCPSSEIPMEKEPGEGRISVVDYSYLEG

SEQ ID NO: 1257 - protein, 62 aa, synthetic construct
LQEILENSESLLEPPDRGAGAAGLPQPPRESPQLHERETPRPEGGSPSPAGTPPQPKRPRPG

SEQ ID NO: 1258 - protein, 62 aa, synthetic construct
EVSGSESAPSSPATAPLQAPTLRGPEPARETPAKLEPKPIIPKAEPRAKARKTEARGLTKAG

SEQ ID NO: 1259 - protein, 62 aa, synthetic construct
EEPEGGFSKWNATNKDPEELFKQEMPPRCSSPTVGPPPLPQKSLETRAQKKLSCSLEDLRSE

SEQ ID NO: 1260 - protein, 62 aa, synthetic construct
IDSLTSILADLECSSPYKPRPPQSSTGSTASPPVSTPVTGHKRMVIPNQPPLTATKKSTLKP

SEQ ID NO: 1261 - protein, 62 aa, synthetic construct
SILADLECSSPYKPRPPQSSTGSTASPPVSTPVTGHKRMVIPNQPPLTATKKSTLKPQPAPQ

SEQ ID NO: 1262 - protein, 62 aa, synthetic construct
QAVPSGEGDAFELTVSCQGGLPKEACMEISSPGCQPPAQRLCQPVLPSPACQLVLHQILKGG

SEQ ID NO: 1263 - protein, 62 aa, synthetic construct
SIAMKLIKLKLQGQQLPVVLPPIMKQPPMFSPLISARFGMGSMPNLSIPQPLPPAAPITSLS

SEQ ID NO: 1264 - protein, 62 aa, synthetic construct
EVRGMEARGMDTRGPVPGPRGPIPSGMQGPSPINMGAVVPQGSRQVPVMQGTGMQGASIQGG

SEQ ID NO: 1265 - protein, 62 aa, synthetic construct
LTISINQMGSPGMGHLKSPTLSQVHSPLVTSPSANLKSPQTPSQMVPLPSANPPGPLKSPQV

SEQ ID NO: 1266 - protein, 62 aa, synthetic construct
PGMGHLKSPTLSQVHSPLVTSPSANLKSPQTPSQMVPLPSANPPGPLKSPQVLGSSLSVRSP

SEQ ID NO: 1267 - protein, 62 aa, synthetic construct
SFKQQRGLSTHLLKKCPVLLRKNKGLPRPDSPIPLQPVLPGTQASEDTESGKPPPASQEAEL

SEQ ID NO: 1268 - protein, 62 aa, synthetic construct
LNTPQMNTPVTLNSAAPASNSGAGVLPSPATPRFSVPTPRTPRTPRTPRGGGTASGQGSVKY

SEQ ID NO: 1269 - protein, 62 aa, synthetic construct
TLNSAAPASNSGAGVLPSPATPRFSVPTPRTPRTPRTPRGGGTASGQGSVKYDSTDQGSPAS

SEQ ID NO: 1270 - protein, 62 aa, synthetic construct
LYAQVCRHHLAPYLATLQLDSSLLIPPKYQTPPAAAQGQATPGNAGPLAPNGSAAPPAGSAF

SEQ ID NO: 1271 - protein, 62 aa, synthetic construct
APYLATLQLDSSLLIPPKYQTPPAAAQGQATPGNAGPLAPNGSAAPPAGSAFNPTSNSSSTN

SEQ ID NO: 1272 - protein, 62 aa, synthetic construct
PNQIKSGTPYRTPKSVRRGVAPVDDGRILGTPDYLAPELLLGRAHGPAVDWWALGVCLFEFL

SEQ ID NO: 1273 - protein, 62 aa, synthetic construct
QGLAQHREGAAPAAAPSFSERELPQPPPLLSPQNAPHVALGPHLRPPFLGVPSALCQTPGYG

SEQ ID NO: 1274 - protein, 62 aa, synthetic construct
APVPTPVLAPMPASTPPAAPAPPSVPMPTPTPSSGPPSTPTLIPAFAPTPVPAPTPAPIFTP

SEQ ID NO: 1275 - protein, 62 aa, synthetic construct
RTKLLFLREPDSDTELQMEGSPISSSSSQLSPLAPFGTNSQPGFRGPTPPSSRPSSTGLEDI

SEQ ID NO: 1276 - protein, 62 aa, synthetic construct
HDLEVEPEPPMMLPLPLQPPLPPPRPPRPPSPPPEPETTDASHPSVPPEPLAEDHPPHTPGL

SEQ ID NO: 1277 - protein, 62 aa, synthetic construct
TEEYMELAKSRGPWRRPPKKRHEDLVPPAGSPELSPPQPLFRPRSEFEEMTILYDIWNGGID

SEQ ID NO: 1278 - protein, 62 aa, synthetic construct
GSQSSESFQFQPPLPPDTPPLPRGTPPPVFTPPLPKGTPPLTPSDSPQTRTASGAVDEDALT

SEQ ID NO: 1279 - protein, 62 aa, synthetic construct
RKRHVEVSQAPLPPAPAYLSSPLALPSQRRSPPEEPPDFCCPKCQYQAPDMDTLQIHVMECI

SEQ ID NO: 1280 - protein, 62 aa, synthetic construct
ARRGWRLFNCSASLDWPRMVESCLGSPCWASPQLLRIIFKAMGQGLPDEEQEKLLRICSIYT

SEQ ID NO: 1281 - protein, 62 aa, synthetic construct
PEKSDKDSTSAYNTGESCRSTPLLVEPLPESPLRRAMAGNSNLNRTPPGPAVATPAKAAPPP

SEQ ID NO: 1282 - protein, 62 aa, synthetic construct
LVEPLPESPLRRAMAGNSNLNRTPPGPAVATPAKAAPPPGSPAKFRSLSRDPEAGRRQHAEE

SEQ ID NO: 1283 - protein, 62 aa, synthetic construct
RRAMAGNSNLNRTPPGPAVATPAKAAPPPGSPAKFRSLSRDPEAGRRQHAEERGRRNPKTGL

SEQ ID NO: 1284 - protein, 62 aa, synthetic construct
SAASFEVVRQCPTAEKPEQEHTPNKMPSLKSPLLPCPATKSLSQKQDPKNISKNTKTNFFSP

SEQ ID NO: 1285 - protein, 62 aa, synthetic construct
EEAFRHKLAMDTYSGPPPGPGPGPALPAHSSPGLPPPALSPSKVHGVRYGQPATSETAEVPS

SEQ ID NO: 1286 - protein, 62 aa, synthetic construct
NTGNGTQSSMGSPLTRPTPRSPANWSSPLTSPTNTSQNTLSPSAFDYDTENMNSEDIYSSLR

SEQ ID NO: 1287 - protein, 62 aa, synthetic construct
PVVSARSSRVIKTPRRFMDEDPPKPPKVEVSPVLRPPITTSPPVPQEPAPVPSPPRAPTPPS

SEQ ID NO: 1288 - protein, 62 aa, synthetic construct
IKTPRRFMDEDPPKPPKVEVSPVLRPPITTSPPVPQEPAPVPSPPRAPTPPSTPVPLPEKRR

SEQ ID NO: 1289 - protein, 62 aa, synthetic construct
EVSPVLRPPITTSPPVPQEPAPVPSPPRAPTPPSTPVPLPEKRRSILREPTFRWTSLTRELP

SEQ ID NO: 1290 - protein, 62 aa, synthetic construct
PLVSPPFSVPVQNGAQPPSKIIQLTPVPVSTPSGLVPPLSPATLPGPTSQPQKVLLPSSTRI

SEQ ID NO: 1291 - protein, 62 aa, synthetic construct
PTAPESELEGQPTPPAPPPLPETWTPTARSSPPLPPPAEERTSAKGPETMASKFPSSSSDWR

SEQ ID NO: 1292 - protein, 62 aa, synthetic construct
FQARYADIFPSKVCLQLKIREVRQKIMQAATPTEQPPGAEAPLPVPPPTGTAAAPAPTPSPA

SEQ ID NO: 1293 - protein, 62 aa, synthetic construct
GPSGSASAGELSSSEPSTPAQTPLAAPIIPTPVLTSPGAVPPLPSPSKEEEGLRAQVRDLEE

SEQ ID NO: 1294 - protein, 62 aa, synthetic construct
ASAGELSSSEPSTPAQTPLAAPIIPTPVLTSPGAVPPLPSPSKEEEGLRAQVRDLEEKLETL

SEQ ID NO: 1295 - protein, 62 aa, synthetic construct
PWGGPAPTPASGDPWRPAAPAGPSVDPWGGTPAPAAGEGPTPDPWGSSDGGVPVSGPSASDP

SEQ ID NO: 1296 - protein, 62 aa, synthetic construct
SGDPWRPAAPAGPSVDPWGGTPAPAAGEGPTPDPWGSSDGGVPVSGPSASDPWTPAPAFSDP

SEQ ID NO: 1297 - protein, 62 aa, synthetic construct
GSSDGGVPVSGPSASDPWTPAPAFSDPWGGSPAKPSTNGTTAAGGFDTEPDEFSDFDRLRTA

SEQ ID NO: 1298 - protein, 62 aa, synthetic construct
EVPARSPGAFDMSGVRGSLAEAVGSPPPAATPTPTPPTRKTPESFLGPNAALVDLDSLVSRP

SEQ ID NO: 1299 - protein, 62 aa, synthetic construct
DMSGVRGSLAEAVGSPPPAATPTPTPPTRKTPESFLGPNAALVDLDSLVSRPGPTPPGAKAS

SEQ ID NO: 1300 - protein, 62 aa, synthetic construct
TAMHLPPTLAAPGQPLRVLKAPLATAAPPCSPLLKAPSPAGPLHKGKKAVNKDSLEYRLRRE

SEQ ID NO: 1301 - protein, 62 aa, synthetic construct
MKGEGSTAEVREEIILTEAAAPTPSPVPSFSPAKSATSVEVPPPSSPVSNPSPEYTGLSTTG

SEQ ID NO: 1302 - protein, 62 aa, synthetic construct
PLGLPIQQTEAGADLQPDTEDPTLVGPPLHTPETEESKTQSSGDMGLPPASKSWSWATLEVP

SEQ ID NO: 1303 - protein, 62 aa, synthetic construct
SQSTELLPDATDEEVAPPKPPLPGIRVVDNSPPPALPPKKRQSAPSPTRVAVVAPMSRATSG

SEQ ID NO: 1304 - protein, 62 aa, synthetic construct
AYSSPSTTPEARRREPQAPRQPSLMGPESQSPDCKDGAAATGATATPSAGASGGLQPHQLSS

SEQ ID NO: 1305 - protein, 62 aa, synthetic construct
NPQQREGSSPKHQDHTTDPKLLTCLGQNLHSPDLARPRCPLPPEASPSREKPGLRESSERGP

SEQ ID NO: 1306 - protein, 62 aa, synthetic construct
TTDPKLLTCLGQNLHSPDLARPRCPLPPEASPSREKPGLRESSERGPPTARSERSAARADTC

SEQ ID NO: 1307 - protein, 62 aa, synthetic construct
QTHKPVQNPLQTTSQSSKQPPPSIRLPSAQTPNGTDYVASGKSIQTPQSHGTLTAELWDNKV

SEQ ID NO: 1308 - protein, 62 aa, synthetic construct
MEAERRRQAEKPKKGRVGSNLLPERHPATGTPTTTVDSSAPPCRRLPGAGGGRSRFSPQGGQ

SEQ ID NO: 1309 - protein, 62 aa, synthetic construct
RAQGGSFRSLRSWLISEGYATGPDDISPDWSPEQCPPEPMEPASPAPTPTSLRAPRTQRTPG

SEQ ID NO: 1310 - protein, 62 aa, synthetic construct
ADSLSCLQDLVSPTVSPAVPQAVPMDLDSPSPCLYEPLLGPAPVPAPDLHFLLDSGLQLPAQ

SEQ ID NO: 1311 - protein, 62 aa, synthetic construct
SSPTKRKGRSRALEAVPAPPASGPRAPAKESPPKRVPDPSPVTKGTAAESGEEAARAIPREL

SEQ ID NO: 1312 - protein, 62 aa, synthetic construct
PTTVDTKDLPPTAMPKPQHTFSDSQSPAESSPGPSLSLSAPAPGDVPKDTCVQSPISSFPCT

SEQ ID NO: 1313 - protein, 62 aa, synthetic construct
IIVEKEADISAFADYRPTEVTDLKPQVPPPTPPPVAAVPPTPQPLAPTPSAPCPATPAGPKG

SEQ ID NO: 1314 - protein, 62 aa, synthetic construct
AFADYRPTEVTDLKPQVPPPTPPPVAAVPPTPQPLAPTPSAPCPATPAGPKGRVFVSPLAKK

SEQ ID NO: 1315 - protein, 62 aa, synthetic construct
TEVTDLKPQVPPPTPPPVAAVPPTPQPLAPTPSAPCPATPAGPKGRVFVSPLAKKLAVEKGI

SEQ ID NO: 1316 - protein, 62 aa, synthetic construct
QVPPPTPPPVAAVPPTPQPLAPTPSAPCPATPAGPKGRVFVSPLAKKLAVEKGIDLTQVKGT

SEQ ID NO: 1317 - protein, 62 aa, synthetic construct
ACRYPSHSSSRVLLKDRHPPAPSPQNPQDPSPDTSPPTCPFKTASFGYLDRSPSACKRDAQK

SEQ ID NO: 1318 - protein, 62 aa, synthetic construct
NPVPKPKRTFEYEADKNPKSKPSNGLPPSPTPAAPPPLPSTPAPPVTRRPKKDMRGHRKSQS

SEQ ID NO: 1319 - protein, 62 aa, synthetic construct
EYEADKNPKSKPSNGLPPSPTPAAPPPLPSTPAPPVTRRPKKDMRGHRKSQSRKSFEFEDAS

SEQ ID NO: 1320 - protein, 62 aa, synthetic construct
CEVGQSHKDVDKEAMMEAGWDPCLQAPFHLTPTLYRTLRNQGNQGAPAESREVLQDTVNLLF

SEQ ID NO: 1321 - protein, 62 aa, synthetic construct
HTVEHGSPRTRDPTPRPPGLPEEATALAAPSPPRARARGRGPGLLEPTDAGGPPRSAPEAAS

SEQ ID NO: 1322 - protein, 62 aa, synthetic construct
LGRAEVALGAQGPREKPAPPQKAKRSVPPASPARAPPATETPGPEKAATDLPAPETPRKKTP

SEQ ID NO: 1323 - protein, 62 aa, synthetic construct
QGPREKPAPPQKAKRSVPPASPARAPPATETPGPEKAATDLPAPETPRKKTPIQKPPRKKSR

SEQ ID NO: 1324 - protein, 62 aa, synthetic construct
PGTRGHSQQEAAMPHIPEDEEPPGEPQAAQSPAGQGPPAAGVSCSPTPTIVLTGDATSPEGE

SEQ ID NO: 1325 - protein, 62 aa, synthetic construct
SLASPYLPEGTSKPLSDRPTKAPVYMPHPETPSKPSPCLVGEASKPPAPSEGSPKAVASSPA

SEQ ID NO: 1326 - protein, 62 aa, synthetic construct
YLPEGTSKPLSDRPTKAPVYMPHPETPSKPSPCLVGEASKPPAPSEGSPKAVASSPAATNSE

SEQ ID NO: 1327 - protein, 62 aa, synthetic construct
QPPQPSCSPCAPRVSEPGTSSQQSDEILSESPSPSDPVLPLPALIQEGRSTSVTNDKLTSKM

SEQ ID NO: 1328 - protein, 62 aa, synthetic construct
DNLIPQIRDKEDPQEMPHSPLGSMPEIRDNSPEPNDPEEPQEVSSTPSDKKGKKRKRCIWST

SEQ ID NO: 1329 - protein, 62 aa, synthetic construct
QKGKLGRIGPPGCKGDPGNRGPDGYPGEAGSPGERGDQGGKGDPGRPGRRGPPGEIGAKGSK

SEQ ID NO: 1330 - protein, 62 aa, synthetic construct
TCASAPQGTLRILEGPQQSLSGSPLQPIPASPPPQIPPGLRPRFCAFGGNPPVTGPRSALAP

SEQ ID NO: 1331 - protein, 62 aa, synthetic construct
CSSSSSLPVIHDPSVFLLGPQLYLPQPQFLSPDVLMPTMAGEPNRLPGTSRSVQQFLAMCDR

SEQ ID NO: 1332 - protein, 62 aa, synthetic construct
HTPGQPLHIKVTPDHVQNTATLEITSPTTESPHSYTSTAVIPNCGTPKQRITILQNASITPV

SEQ ID NO: 1333 - protein, 62 aa, synthetic construct
GPYQAATGPSSAPSAPPSYEETVAVNSYYPTPPAPMPGPTTGLVTGPDGKGMNPPSYYTQPA

SEQ ID NO: 1334 - protein, 62 aa, synthetic construct
HNPSSQLPPLTAVDAGAERFAPSAPSPHHISPRRVPAPSSILQRTQPPYTQQPSGSHLKSYQ

SEQ ID NO: 1335 - protein, 62 aa, synthetic construct
ISQAYGLMNELLSESVQLPTLPQKPLPNKPSPTQSSSCQHCPSPRGENQHGHSFLINRPGKV

SEQ ID NO: 1336 - protein, 62 aa, synthetic construct
ALGLPMRGMSNNTPQLNRSLSQGTQLPSHVTPTTGVPTMSLHTPPSPSRGILPMNPRNMMNH

SEQ ID NO: 1337 - protein, 62 aa, synthetic construct
LTFIRAAETDPGMVHLALGSDLTTLGLNLNSPENLYPKFASPWASSPCRPQDIDFHVPSEYL

SEQ ID NO: 1338 - protein, 62 aa, synthetic construct
PGMVHLALGSDLTTLGLNLNSPENLYPKFASPWASSPCRPQDIDFHVPSEYLTNIHIRDKLA

SEQ ID NO: 1339 - protein, 62 aa, synthetic construct
LALGSDLTTLGLNLNSPENLYPKFASPWASSPCRPQDIDFHVPSEYLTNIHIRDKLAAIKLG

SEQ ID NO: 1340 - protein, 62 aa, synthetic construct
LRKRQSQRWGGLEAPAARVGGAKVAVPTGPTPLDSTPPGGAPHPLTGQEEARAVEKDKSKAR

SEQ ID NO: 1341 - protein, 62 aa, synthetic construct
SQRWGGLEAPAARVGGAKVAVPTGPTPLDSTPPGGAPHPLTGQEEARAVEKDKSKARSEDTG

SEQ ID NO: 1342 - protein, 62 aa, synthetic construct
EFTIVKPDPPENVVARPVPSNPRRLEVTWQTPSTWPDPESFPLKFFLRYRPLILDQWQHVEL

SEQ ID NO: 1343 - protein, 62 aa, synthetic construct
QARYMADTFYTNAGCTLVALNPFKPVPQLYSPELMREYHAAPQPQKLKPHVFTVGEQTYRNV

SEQ ID NO: 1344 - protein, 62 aa, synthetic construct
YGSPCSAPSPSTPSFQPPQLSPWDGSFGHFSPSQTYEGLRAWTEQLPKASGPPQPPAFFSFS

SEQ ID NO: 1345 - protein, 62 aa, synthetic construct
RSKSPQAMASHGSRPGSRLKQPIGQIPLESSPPVGLSIEEVERLNTPRPRNPSICSADHGRS

SEQ ID NO: 1346 - protein, 62 aa, synthetic construct
RRGRKINEDEIPPPVALGKRPLAPQEPANRSPETDPPAPPALESDNPSQPETSLPGISAQPV

SEQ ID NO: 1347 - protein, 62 aa, synthetic construct
LDLSPPHLSSSPEDLCPAPGTPPGTPRPPDTPLPEEVKRSQPLLIPTTGRKLREEERRATSL

SEQ ID NO: 1348 - protein, 62 aa, synthetic construct
LIPTTGRKLREEERRATSLPSIPNPFPELCSPPSQSPILGGPSSARGLLPRDASRPHVVKVY

SEQ ID NO: 1349 - protein, 62 aa, synthetic construct
GRKLREEERRATSLPSIPNPFPELCSPPSQSPILGGPSSARGLLPRDASRPHVVKVYSEDGA

SEQ ID NO: 1350 - protein, 62 aa, synthetic construct
PGYYNPSDCTKVPKKTLFPKNPILNFSAQPSPLPPKPPFPGPGQYEIVDYLGPRKHFISSAS

SEQ ID NO: 1351 - protein, 62 aa, synthetic construct
NPAAARAPSAKGTISAPGKVVTAAAQAKQRSPSKVKPPVRNPQNSTVLARGPASVPSVGKAV

SEQ ID NO: 1352 - protein, 62 aa, synthetic construct
PEFIHAAMRPDVITETVVEVSTEESEPMDTSPIPTSPDSHEPMKKKKVGRKPKTQQSPISNG

SEQ ID NO: 1353 - protein, 62 aa, synthetic construct
AAMRPDVITETVVEVSTEESEPMDTSPIPTSPDSHEPMKKKKVGRKPKTQQSPISNGSPELG

SEQ ID NO: 1354 - protein, 62 aa, synthetic construct
GRGRKETGTAKPGVSTVPNTTQASTPPQTQTPQPNPPPVQATPHPFPAVTPDLIVQTPVMTV

SEQ ID NO: 1355 - protein, 62 aa, synthetic construct
QATPHPFPAVTPDLIVQTPVMTVVPPQPLQTPPPVPPQPQPPPAPAPQPVQSHPPIIAATPQ

SEQ ID NO: 1356 - protein, 62 aa, synthetic construct
PQQPSRPSNRAAALPPKPARPPAVSPALTQTPLLPQPPMAQPPQVLLEDEEPPAPPLTSMQM

SEQ ID NO: 1357 - protein, 62 aa, synthetic construct
DGALKPETLLASRSPSSNGLSPSPGAGMLKTPSPSRDPGEFPRLPDPNVVFPPTPRRWNTQQ

SEQ ID NO: 1358 - protein, 62 aa, synthetic construct
RREENSFDRDTIAPEPPAKRVCTISPAPRHSPALTVPLMNPGGQFHPTPPPLQHYTLEDIAT

SEQ ID NO: 1359 - protein, 62 aa, synthetic construct
SEASSEAGVVTTRQTRPDSFQERFNGQATKTPEPSSPVKEPPPVLAKPKLDSTQLQQLHNQV

SEQ ID NO: 1360 - protein, 62 aa, synthetic construct
LLVSHPSVQTKSPGGLSIQNEPLPPGPTEPTPPPFTFSIPSGNQFQPRCVSPIPVSPTSRIQ

SEQ ID NO: 1361 - protein, 62 aa, synthetic construct
SATGPQWYQESQESESEGKQPPPGPLAPPKSPEPSGPLASEQDAPLPEGDDAPPRPSMLDDA

SEQ ID NO: 1362 - protein, 62 aa, synthetic construct
PPAPPSSCHQNTSGSFRRPESPRPRVSFPKTPEVGPGPPPGPLSKAPQPVPPGVGELPARGP

SEQ ID NO: 1363 - protein, 62 aa, synthetic construct
GESGLVVRAIGTACTLDKLSSPAAFLPACNSPSKEMKEIPFNEDPNPNTHSSGPSTPLKNQT

SEQ ID NO: 1364 - protein, 62 aa, synthetic construct
GTTTENTFYQDFSGCQGYSEAPGYRSALWLTPEQTCLLQPSPQQPFPLQPGSYPAGGGAGQT

SEQ ID NO: 1365 - protein, 62 aa, synthetic construct
AHTSPAPAPRPTPRPVPMKRHIFRSPPVPATPPEPLPTTTEDEGLPAAPPIPPRRSCLPPTC

SEQ ID NO: 1366 - protein, 62 aa, synthetic construct
NGGWHTSSLSLSLPSTIAAPHPMDGPPGGSTPVTPVIKAGWLDKNPPQGSYIYQKRWVRLDT

SEQ ID NO: 1367 - protein, 62 aa, synthetic construct
EGDAGDLGRVRDEAEPGGEGDPGPEPAGTPSPSGEADGDCAPEDAAPSSGGAPRQDAAREVP

SEQ ID NO: 1368 - protein, 62 aa, synthetic construct
ADVNLPAAQLQIAMGIPLYRIKDIRMMYGVSPWGDSPIDFEDSAHVPCPRGHVIAARITSEN

SEQ ID NO: 1369 - protein, 62 aa, synthetic construct
EDAVEHEQKKSSKRTLPADYGDSLAKRGSCSPWPDAPTAYVNNSPSPAPTFTSPQQSTCSVP

SEQ ID NO: 1370 - protein, 62 aa, synthetic construct
LPADYGDSLAKRGSCSPWPDAPTAYVNNSPSPAPTFTSPQQSTCSVPDSNSSSPNHQGDGAS

SEQ ID NO: 1371 - protein, 62 aa, synthetic construct
AWSGSTLPSRPATPNVATPFTPQFSFPPAGTPTPFPQPPLNPFVPSMPAAPPTLPLVSTPAG

SEQ ID NO: 1372 - protein, 62 aa, synthetic construct
GIMDPPVTDDIHIHQLPLQVDPAPDYLAERSPPSVSSASSGSGSSSPITIQQHPRLILTDSG

SEQ ID NO: 1373 - protein, 62 aa, synthetic construct
SSEADDEEADGESSGEPPGAPKEDGVLGSRSPRTEESKADSPPPSYPTQQAEQAPNTCECHV

SEQ ID NO: 1374 - protein, 62 aa, synthetic construct
LHLYPHIHGHVPLHTVPHLPRPLIHPTLYATPPFTHSKALPPAPVQNHTNKHQVFNASLQDH

SEQ ID NO: 1375 - protein, 62 aa, synthetic construct
FHGISKEDHRHSAPAAPRNSPTGLAPLPALSPAALSPAALSPASTPHLANLAAPSFPKTATT

SEQ ID NO: 1376 - protein, 62 aa, synthetic construct
HSAPAAPRNSPTGLAPLPALSPAALSPAALSPASTPHLANLAAPSFPKTATTTPGFVDTRKS

SEQ ID NO: 1377 - protein, 62 aa, synthetic construct
LNQLVFAEPVAVKSFLPYLLGPKKDHAQGETPCLLSPALFQSRVIPVLLQLFEVHEEHVRMV

SEQ ID NO: 1378 - protein, 62 aa, synthetic construct
LTVHQPTEQPIQVQVQIQGQAPQSAAPSIQTPSLQSPSPSQLQAAQIQVQHVQAAQQIQAAE

SEQ ID NO: 1379 - protein, 62 aa, synthetic construct
PTEQPIQVQVQIQGQAPQSAAPSIQTPSLQSPSPSQLQAAQIQVQHVQAAQQIQAAEIPEEH

SEQ ID NO: 1380 - protein, 62 aa, synthetic construct
TIVLEDEGSQGTDAPTPGNAENEPPEKETLSPPRRTPAPPEPGSPAPGEGPSGRKRRRVPRD

SEQ ID NO: 1381 - protein, 62 aa, synthetic construct
DEGSQGTDAPTPGNAENEPPEKETLSPPRRTPAPPEPGSPAPGEGPSGRKRRRVPRDGRRAG

SEQ ID NO: 1382 - protein, 62 aa, synthetic construct
GGPNKIRQKCRLRQCQLRARESYKYFPSSLSPVTPSESLPRPRRPLPTQQQPQPSQKLGRIR

SEQ ID NO: 1383 - protein, 62 aa, synthetic construct
PSYHKKPPGTPPPSALPLGAPPPDALPPGPTPEDSPSLETGSRQSDYMEALLQAPGSSMEDP

SEQ ID NO: 1384 - protein, 62 aa, synthetic construct
DPLESPPTAPDPALELPSTPPPSSLLRPRLSPWGLAPLFRSVRSKLESFADIFLTPNKTPQP

SEQ ID NO: 1385 - protein, 62 aa, synthetic construct; identical to SEQ ID NO: 1364

SEQ ID NO: 1386 - protein, 62 aa, synthetic construct
PFGQASASIMAAFMDNPFEFNPEDPIPVSFSPVDTNSTSGDPVEKKDETPFGVSVAVGLAVF

SEQ ID NO: 1387 - protein, 62 aa, synthetic construct
PGADVPTPSEGTSTSSPLPAPKKPTGADLLTPGSRAPELKGRARGKPSLLAAARPMRAILPA

SEQ ID NO: 1388 - protein, 62 aa, synthetic construct
KAPACFCPDQHGPKEQGPKHHPPIPFPCLGTPKGSGGSGPGGLERTPFLSPSHSDFKEEKER

SEQ ID NO: 1389 - protein, 62 aa, synthetic construct
KPLILSRKKDQATENTSPLNTPHTSANLVMTPQGQLLTLKGPLFSGPVVAVSPDLLESDLKP

SEQ ID NO: 1390 - protein, 62 aa, synthetic construct
LFPASPTREAHRESSVPVTPSVPPPASQHSTPAGLPPSRAKPPTEGAGSPAKASQASKLRAS

SEQ ID NO: 1391 - protein, 62 aa, synthetic construct
KCHRAPIFMRVPFLEFKAPGIPSGMETLKDTPAPRLLKTHLPLALLPQTLLDQKVKVVYVAR

SEQ ID NO: 1392 - protein, 62 aa, synthetic construct
SSSDRTPLTSPSPSPSLDFSAPGTPASHSATPSLLSEADLIPDVMPPQALFHDDDEMEGDGV

SEQ ID NO: 1393 - protein, 62 aa, synthetic construct
PERTPGSGSGSGLQAPGPALTPSLLPTHTLTPVLLTPSSLPPSIHFWSTLSPIAPRSPAKLS

SEQ ID NO: 1394 - protein, 62 aa, synthetic construct
GSGSGSGLQAPGPALTPSLLPTHTLTPVLLTPSSLPPSIHFWSTLSPIAPRSPAKLSFQFPS

SEQ ID NO: 1395 - protein, 62 aa, synthetic construct
IHATPTPVTAIGPPTTAIQEPPSRIVPTPTSPAIAPPTETMAPPVRDPVPGKPTVTIRTRGA

SEQ ID NO: 1396 - protein, 62 aa, synthetic construct
PLDATTSSHHHLSPLPMAESTRDGLGPGLLSPIVSPLKGLGPPPLPPSSQSHSPGGQPFPTL

SEQ ID NO: 1397 - protein, 62 aa, synthetic construct
SSASPHPCPSPLSNATAQSPLPILSPTVSPSPSPIPPVEPLMSAASPGPPTLSSSSSSSSSS

SEQ ID NO: 1398 - protein, 62 aa, synthetic construct
WFCNRRQKEKRINPCSAAPMLPSPGKPASYSPHMVTPQGGAGTLPLSQASSSLSTTVTTLSS

SEQ ID NO: 1399 - protein, 62 aa, synthetic construct
RQKEKRINPCSAAPMLPSPGKPASYSPHMVTPQGGAGTLPLSQASSSLSTTVTTLSSAVGTL

SEQ ID NO: 1400 - protein, 62 aa, synthetic construct
KHAGFSCSSFVSDGPPERTPSLPPHSPRIASPGPEQVQGHCPAGPGPGPFRLSPSDKYPGFG

SEQ ID NO: 1401 - protein, 62 aa, synthetic construct
APGPIPGKNPLQDLLMGHTPSCYGQTYLHLSPGLAPPGPPQPLFPQPDGHLELRAQPGTPQD

SEQ ID NO: 1402 - protein, 62 aa, synthetic construct
DVELESESVSEKGDLDYYWLDPATWHSRETSPISSHPVTWQPSKEGDRLIGRVILNKRTTMP

SEQ ID NO: 1403 - protein, 62 aa, synthetic construct
LYHTHPMPKPRSYYLQPLPLPPEEEEEEPTSPVSQEPERKSAELSDQGKTTTDEEKKTKGRK

SEQ ID NO: 1404 - protein, 62 aa, synthetic construct
HKRSEGSAQAAPGPGSPQLPAGPQESAAEPTPAVPLKPAQEPPPGAPPEHPQDPIEAPPSLY

SEQ ID NO: 1405 - protein, 62 aa, synthetic construct
SVPAPACPPSLQQHFPDPAMSFAPVLPPPSTPMPTGPGQPAPPGQQPPPLAQPTPLPQVLAP

SEQ ID NO: 1406 - protein, 62 aa, synthetic construct
TPLAGIDGLPPALPDLPTATVPPVPPPQYFSPAVILPSLAAPLPPASPALPLQAVKLPHPPG

SEQ ID NO: 1407 - protein, 62 aa, synthetic construct
VSASVQSVPTQTATLLPPANPPLPGGPGIASPCPTVQLTVEPVQEEQASQDKPPGLPQSCES

SEQ ID NO: 1408 - protein, 62 aa, synthetic construct
TPMPKKRGRKSKAELLLLKLSKDLDRPESQSPKRPPEDFETPSGERPRRRAAQVALLYLQEL

SEQ ID NO: 1409 - protein, 62 aa, synthetic construct
SKAELLLLKLSKDLDRPESQSPKRPPEDFETPSGERPRRRAAQVALLYLQELAEELSTALPA

SEQ ID NO: 1410 - protein, 62 aa, synthetic construct
TQDSPQIPDPGGDFQEPSGTQPFSSNEQEMSPTRTELCQDSPMCTKLQDILVSASHSPDHPV

SEQ ID NO: 1411 - protein, 62 aa, synthetic construct
TEVIPMLEVRLLYEINDVETPEGEQPPPLPTPVGGSNPQPIPPQSHPSTSSSSSDGLRDNVP

SEQ ID NO: 1412 - protein, 62 aa, synthetic construct
CSNVMNKARQPPPGVMPKGRPPSASSLDAISPVQIDPLAGMTSLSIGGSAAPHTQSMQGFPP

SEQ ID NO: 1413 - protein, 62 aa, synthetic construct
EGAVTESQSLFSDNFRHPNPIPSGLPPFPSSPQTSSDWPTAPEPQSLFTSETIPVSSSTDWQ

SEQ ID NO: 1414 - protein, 62 aa, synthetic construct
SQAPATGSENSAVNQKPTNLPKVEESQQKNTPPTDSPSKAGPRGSVQYLPDLDDKNSQEKGP

SEQ ID NO: 1415 - protein, 62 aa, synthetic construct
AMEPPAMDFSRRLRELAGNTSSPPLSPGRPSPMQRLLQPFQPGSKPPFLATPPLPPLQSAPP

SEQ ID NO: 1416 - protein, 62 aa, synthetic construct
SSPPLSPGRPSPMQRLLQPFQPGSKPPFLATPPLPPLQSAPPPSQPPVKSKSCEFCGKTFKF

SEQ ID NO: 1417 - protein, 62 aa, synthetic construct
GPSLSAMGNGRSSSPTSSLTQPIEMPTLSSSPTEERPTVGPGQQDNPLLKTFSNVFGRHSGG

SEQ ID NO: 1418 - protein, 62 aa, synthetic construct
SQSYTIMSPAVLKSELQSPTHPSSALPPATSPTAQESYSQYPVPDVSTYQYDETSGYYYDPQ

SEQ ID NO: 1419 - protein, 62 aa, synthetic construct
KKRLGTNQENQQPNQQPPGKKPFLRNLLPRTPTCQSSTDCSPYARILRSRRSPLLKSGPFGK

SEQ ID NO: 1420 - protein, 62 aa, synthetic construct
YVTEIAQDEIYILDPELLGASARPDLPTPTSPLPTSPCSPTPRSLQGDAAPPQGEELIEAAK

SEQ ID NO: 1421 - protein, 62 aa, synthetic construct
AQDEIYILDPELLGASARPDLPTPTSPLPTSPCSPTPRSLQGDAAPPQGEELIEAAKRNDFC

SEQ ID NO: 1422 - protein, 62 aa, synthetic construct
YILDPELLGASARPDLPTPTSPLPTSPCSPTPRSLQGDAAPPQGEELIEAAKRNDFCKLQEL

SEQ ID NO: 1423 - protein, 62 aa, synthetic construct
PVPSSPAMASAIECHSPYTSPAAHWSSPGASPYLKQPPALTPSSNPAASAGLHSSMSSYSLE

SEQ ID NO: 1424 - protein, 62 aa, synthetic construct
NKVGSAEAFAQLLVQGPPGSLPATSIPAGSTPTVQVTPQLETKSIGASVEFHCAVPSDRGTQ

SEQ ID NO: 1425 - protein, 62 aa, synthetic construct
GSSPTRVLDEGKVNMAPKGPPPFPGVPLMSTPMGGPVPPPIRYGPPPQLCGPFGPRPLPPPF

SEQ ID NO: 1426 - protein, 62 aa, synthetic construct
PTPPSSHGSDSEGSLSPNPRLHPFSLPQTHSPSRAAPRAPSALSSSPLLTAPHKLQGSGPLV

SEQ ID NO: 1427 - protein, 62 aa, synthetic construct
SPNPRLHPFSLPQTHSPSRAAPRAPSALSSSPLLTAPHKLQGSGPLVLTEEEKRTLIAEGYP

SEQ ID NO: 1428 - protein, 62 aa, synthetic construct
PQRSTLMPAAPGVSPKLHDLSPAAYTKGVASPGHCHLGLPQPAGEAPAVQDVPRPVATHPGS

SEQ ID NO: 1429 - protein, 62 aa, synthetic construct
PGHCHLGLPQPAGEAPAVQDVPRPVATHPGSPGQPPPALLPQQVSAPPSSSCPPGLEHSLCP

SEQ ID NO: 1430 - protein, 62 aa, synthetic construct
PVCKEGIRGHTESCSCPLQQSPRADNSAPGTPTRKISASEFDRPLRPIVVKDSEGTVSFLSD

SEQ ID NO: 1431 - protein, 62 aa, synthetic construct
ELRVWYAAFYAKKMDKPMLKQAGSGVHAAGTPENSAPVESEPSQWACKVCSATFLELQLLNE

SEQ ID NO: 1432 - protein, 62 aa, synthetic construct
VTTPLHRDKTPLHQKHAAFVTPDQKYSMDNTPHTPTPFKNALEKYGPLKPLPQTPHLEEDLK

SEQ ID NO: 1433 - protein, 62 aa, synthetic construct
HRDKTPLHQKHAAFVTPDQKYSMDNTPHTPTPFKNALEKYGPLKPLPQTPHLEEDLKEVLRS

SEQ ID NO: 1434 - protein, 62 aa, synthetic construct
YVPPPVATPFSSKSSTKPAAGGTAPLPPWKSPSSSQPLPQVPAPAQSQTQFHVQPQPQPKPQ

SEQ ID NO: 1435 - protein, 62 aa, synthetic construct
ARGADAAGTGEAPVPGPGAPLPPAPLQVSESPWLHAPSLKTSCEYVSLYHQPAAMMEDSDSD

SEQ ID NO: 1436 - protein, 62 aa, synthetic construct
MAEEPQSVLQLPTSIAAGGEGLTDVSPETTTPEPPSSAAVSPGTEEPAGDTKKKIDILLKAV

SEQ ID NO: 1437 - protein, 62 aa, synthetic construct
LPTSIAAGGEGLTDVSPETTTPEPPSSAAVSPGTEEPAGDTKKKIDILLKAVGDTPIMKTKK

SEQ ID NO: 1438 - protein, 62 aa, synthetic construct
LCSGHTCGLAPPEDCEHLHHGPDARPPYLLSPADSCPGGRHRCSPRSSVHSECVMMPVVLGD

SEQ ID NO: 1439 - protein, 62 aa, synthetic construct
LGIIGDISTATVSTPAPPPVDDSWIQHSRRSPPPSPTTQRRPTLSAPLARPTSGRGPAPAIP

SEQ ID NO: 1440 - protein, 62 aa, synthetic construct
PPSPTTQRRPTLSAPLARPTSGRGPAPAIPSPGPHSGAPPVPFRPGPLPPFPSSSDSFGAPP

SEQ ID NO: 1441 - protein, 62 aa, synthetic construct
LAASILADLRGGPGAAPGGASPASSSSAASSPSSGRAPGAAPSAAAKSHRCPFPDCAKAYYK

SEQ ID NO: 1442 - protein, 62 aa, synthetic construct
TQACSMGELLQCGCQAPRGRAPPRPSGLPGTPGPPGPAGSPEGSAAWEWGGCGDDVDFGDEK

SEQ ID NO: 1443 - protein, 62 aa, synthetic construct
MTYTEKSEVSSSIHPRPETSAPGAETTLTSTPGNRAISLTLPFSSIPVEEVISTGITSGPDI

SEQ ID NO: 1444 - protein, 62 aa, synthetic construct
RGPGDMSWQSSPSLENPSSLPSLLSLPATTSPPPISSTLPVTISSSPLPVTSLLTSSPVTTT

SEQ ID NO: 1445 - protein, 62 aa, synthetic construct
PEDVSWPSPLSVEKNSPPSSLVSSSSVTSPSPLYSTPSGSSHSSPVPVTSLFTSIMMKATDM

SEQ ID NO: 1446 - protein, 62 aa, synthetic construct
ETYDVPPAFAKAKPFDPARTPLVLAAPPPDSPPAEDVYDVPPPAPDLYDVPPGLRRPGPGTL

SEQ ID NO: 1447 - protein, 62 aa, synthetic construct
APGPSSLVPTLSMIAPPPVMASAPIPKALGTPVLTPPTEAASQDRMPQDLDLDMYMENLECD

SEQ ID NO: 1448 - protein, 62 aa, synthetic construct
RCLHDIALAHRAATAARPPAPPPAPQPPSPTPSPPRPTLAREDNEEDEDEPTETETSGEQLG

SEQ ID NO: 1449 - protein, 62 aa, synthetic construct
AIGTDGTPGAKGPTGSPGTSGPPGSAGPPGSPGPQGSTGPQGIRGQPGDPGVPGFKGEAGPK

SEQ ID NO: 1450 - protein, 62 aa, synthetic construct
SYLPPARWNSSGEGHLELWDAPVPVFPLTISPGPVTPIPVLYPESASCLLRLRNKLRGVQRN

SEQ ID NO: 1451 - protein, 62 aa, synthetic construct
ARWNSSGEGHLELWDAPVPVFPLTISPGPVTPIPVLYPESASCLLRLRNKLRGVQRNLAGSL

SEQ ID NO: 1452 - protein, 62 aa, synthetic construct
PLSLAPAHLPGTEEDSLYLDHSGPLGPSKPSPPLPQPTMLKGAVSLPVAGKQGPIFGRREQG

SEQ ID NO: 1453 - protein, 62 aa, synthetic construct
DSSSNPSSTTSSTPSSPAPFPTSSNPSSATTPPNPSPGQRDSRFNFPAAYFIHHRQQFIFPV

SEQ ID NO: 1454 - protein, 62 aa, synthetic construct
AAPVLWTVESFFQCVGSGTESPASTAALRTTPSPPSPGPETPPAGVPPAASSQVWAAGPAAQ

SEQ ID NO: 1455 - protein, 62 aa, synthetic construct
WTVESFFQCVGSGTESPASTAALRTTPSPPSPGPETPPAGVPPAASSQVWAAGPAAQEWLSR

SEQ ID NO: 1456 - protein, 62 aa, synthetic construct
FFQCVGSGTESPASTAALRTTPSPPSPGPETPPAGVPPAASSQVWAAGPAAQEWLSRDLLHR

SEQ ID NO: 1457 - protein, 62 aa, synthetic construct
QTSASILPRVVQAQRGPQPPPGEAGIPGHPTPPATLPSEPVEGVQASPWRPRPVLPTHPALT

SEQ ID NO: 1458 - protein, 62 aa, synthetic construct
GVQASPWRPRPVLPTHPALTLPVSSDASSPSPPAPRPERPESLLVSGPSVTLTEGLGTVRPE

SEQ ID NO: 1459 - protein, 62 aa, synthetic construct
GHMDLSSSEPSQDIEGPGLSILPARDATFSTPSVRQPDPSAWLSSGPELTGMPRVRLAAPLA

SEQ ID NO: 1460 - protein, 62 aa, synthetic construct
AEPAARWAPSGLFSKRRAPGPPTSACPNVLTPDRIPQFFIPPRLPDPGGAVPAARRHVAGRG

SEQ ID NO: 1461 - protein, 62 aa, synthetic construct
SDTASSPDSSPFGSPRPGLGRRRVSRPHSLSPEKASSADTSPHSPRRAGPPTPPLFHLDFLC

SEQ ID NO: 1462 - protein, 62 aa, synthetic construct
TLQKLADMTGLSRRVIQVWFQNCRARHKKHTPQHPVPPSGAPPSRLPSALSDDIHYTPFSSP

SEQ ID NO: 1463 - protein, 62 aa, synthetic construct
MAVPPRGRGIDPARTNPDTFPPSGARCMEPSPERPACSQQEPTLGMDAMASEHRDVLVLLPS

SEQ ID NO: 1464 - protein, 62 aa, synthetic construct
TLGTVLGLATLHTYRGRLSYLPATVEPASPTPAHSLPRAKSELTLTPDPAPPMAHSPLHRSV

SEQ ID NO: 1465 - protein, 62 aa, synthetic construct
GRLSYLPATVEPASPTPAHSLPRAKSELTLTPDPAPPMAHSPLHRSVSDLPLPLPQPALASP

SEQ ID NO: 1466 - protein, 62 aa, synthetic construct
EPASPTPAHSLPRAKSELTLTPDPAPPMAHSPLHRSVSDLPLPLPQPALASPGSPEPLPILS

SEQ ID NO: 1467 - protein, 62 aa, synthetic construct
AGDWGGAGDAPLSPDPLLSSPPGSPKAALHSPVSEGAPVIPPSSGLPLPTPDARVGASTCGP

SEQ ID NO: 1468 - protein, 62 aa, synthetic construct
GAAPAQSPAAPDPEASPLAEPPQEQSLAPWSPQTPAPPCSRCFARAIESSRDLLHRIKDEVG

SEQ ID NO: 1469 - protein, 62 aa, synthetic construct
YISEDGETSDQQLNQSMDTGSPAELSPTTLSPVNHSLDLQPVTYSEPAFWCSIAYYELNQRV

SEQ ID NO: 1470 - protein, 62 aa, synthetic construct
AKEKNISLQTAIAIEALTQLSSALPQPSHSTPQASCPLPEALSPPAPFRSPQSYLRAPSWPV

SEQ ID NO: 1471 - protein, 62 aa, synthetic construct
KRSLFLEQVHDTSFPAPSEPSAPGWWPPPSSPVPRLPDRPPKEKKKKLPTPAGGPVGTEKAA

SEQ ID NO: 1472 - protein, 62 aa, synthetic construct
PPGERGGPGSRGFPGADGVAGPKGPAGERGSPGPAGPKGSPGEAGRPGEAGLPGAKGLTGSP

SEQ ID NO: 1473 - protein, 62 aa, synthetic construct
RDFTQEKSVFCRIRGGPDRDPGPRYQPFRLTPYVTKIRVSDGAPAQPCCLLIAERIHSGYEA

SEQ ID NO: 1474 - protein, 62 aa, synthetic construct
HQNPRAEAPCYVSHPSPVPPSTPWPTPPATTPFPAVVQPYPLPVFSPRGGPQPLPPAPTSVP

SEQ ID NO: 1475 - protein, 62 aa, synthetic construct
LPNYLFPTPSSYPYGALQTPAEGPPTPASHSPSPSLPALAPSPPHRPDSPLFNSRCSSPLQL

SEQ ID NO: 1476 - protein, 62 aa, synthetic construct
ENRFGLGTPEKNTKAEPKAEAGSRSRSSSSTPTSPKPLLQSPKPSLAARPVIPQKPRTASRP

SEQ ID NO: 1477 - protein, 62 aa, synthetic construct
VGRLEVSMVKPTPGLTPRFDSRVFKTPGLRTPAAGERIYNISGNGSPLADSKEIFLTVPVGG

SEQ ID NO: 1478 - protein, 62 aa, synthetic construct
AFTIQGAPSDSGPLRIAKTPSPPEEPSPLPSPTASPNHTLAPASPAPARPRSPSQTRKGPPV

SEQ ID NO: 1479 - protein, 62 aa, synthetic construct
LRIAKTPSPPEEPSPLPSPTASPNHTLAPASPAPARPRSPSQTRKGPPVPPLPKVTPTKELQ

SEQ ID NO: 1480 - protein, 62 aa, synthetic construct
QKKGKSLDSEPSVPSAAKPPSPEKTAPVASTPSSTPIPALSPPTKVPEPNENVGDAVQTKLI

SEQ ID NO: 1481 - protein, 62 aa, synthetic construct
PSVPSAAKPPSPEKTAPVASTPSSTPIPALSPPTKVPEPNENVGDAVQTKLIMLVDDFYYGR

SEQ ID NO: 1482 - protein, 62 aa, synthetic construct
AGATPAEPEELLTPLAPALPSPASTATPPPTPTHPQALALPPLATEGAECLNVDDQDEGSPV

SEQ ID NO: 1483 - protein, 62 aa, synthetic construct
YARTSVIESPSTNRTTPVSTPPLLTSSKAGSPINLSQHSLVIKWNSPPYVCSTQSEKLTNTA

SEQ ID NO: 1484 - protein, 62 aa, synthetic construct
ATSGTQSLHPPSPSFCVPLDVPAEPGPSCKSPSDQLPPQQPLEAEKASPHPSPGPCRPPHGT

SEQ ID NO: 1485 - protein, 62 aa, synthetic construct
RPRGPRPLPARPRDGAPEPGLTLPDLPEQFSPPDVAPPLLVKLVEAIERTGLDSESHYRPEL

SEQ ID NO: 1486 - protein, 62 aa, synthetic construct
LSLFHPSNVEMLSSMDSASVRIIKPFPAPQTPGRLQPAPVIPSAPAAPKLDHQRMDTIQEDP

SEQ ID NO: 1487 - protein, 62 aa, synthetic construct
LLLELNAVQHNPPGFPADEANSSPPLPGALSPLYGVPETNSPLGGKAGPLTKEKPKRNGGRG

SEQ ID NO: 1488 - protein, 62 aa, synthetic construct
NPPGFPADEANSSPPLPGALSPLYGVPETNSPLGGKAGPLTKEKPKRNGGRGLEDVRPSVES

SEQ ID NO: 1489 - protein, 62 aa, synthetic construct
THTVIISPYLYESYSMPVIPQPEILSSGAYSPITVWTTAAPFHAQLPNGLSPLSGYSSSLGR

SEQ ID NO: 1490 - protein, 62 aa, synthetic construct
NSASVENVSLRKSSEGGVGVGPGGGDEPPTSPRQLQPAPPLAPQGRPWTPGQPGGLVGCPGS

SEQ ID NO: 1491 - protein, 62 aa, synthetic construct
DGTGSASGTLPVSQPKSWASLFHDSKPSSSSPVAYVETKYSPPAISPLVSEKQVEVKEGLVP

SEQ ID NO: 1492 - protein, 62 aa, synthetic construct
PVSQPKSWASLFHDSKPSSSSPVAYVETKYSPPAISPLVSEKQVEVKEGLVPVSEDPVAIKI

SEQ ID NO: 1493 - protein, 62 aa, synthetic construct
KSWASLFHDSKPSSSSPVAYVETKYSPPAISPLVSEKQVEVKEGLVPVSEDPVAIKIAELLE

SEQ ID NO: 1494 - protein, 62 aa, synthetic construct
EPELEQDQNLARMAPAPEGPIVLSRPQDGDSPLSDSPPFYKPSFSWDTLATTYGHSYRQAPS

SEQ ID NO: 1495 - protein, 62 aa, synthetic construct
PVTESSVLTTPTVAPVPSTEAPSEQAPPEKSPVVQDCYHGDGRSYRGISSTTVTGRTCQSWS

SEQ ID NO: 1496 - protein, 62 aa, synthetic construct
QTPEASQASPCPAVTPSAPSAALPDEGSRHTPSPGLPAEGAPEAPRPSSPPPEVLEPHSLDQ

SEQ ID NO: 1497 - protein, 62 aa, synthetic construct
YQQTTISHSPSSRFVPPQTSSGNRFMPQQNSPVPSPYAPQSPAGYMPYSHPSSYTTHPQMQQ

SEQ ID NO: 1498 - protein, 62 aa, synthetic construct
SSRFVPPQTSSGNRFMPQQNSPVPSPYAPQSPAGYMPYSHPSSYTTHPQMQQASVSSPIVAG

SEQ ID NO: 1499 - protein, 62 aa, synthetic construct
AHHLHAAAAPPPAPPHHGAAAPPPGQLSPASPATAAPPAPAPTSAPGLQFACARQPELAMMH

SEQ ID NO: 1500 - protein, 62 aa, synthetic construct
AGTHGTPSAPSRSLSELCLAVPAPGIRTQGSPQEAGPSWDCRGAPSPGSGPGLVGCLAGEPA

SEQ ID NO: 1501 - protein, 62 aa, synthetic construct
DDGMRGEDGEIGPRGLPGEAGPRGLLGPRGTPGAPGQPGMAGVDGPPGPKGNMGPQGEPGPP

SEQ ID NO: 1502 - protein, 62 aa, synthetic construct
SQDRDEREGGHPQESLPCTLAPCPWRSPASSPEPSSPESESRGPGPRPSPASSQEGSPQLQH

SEQ ID NO: 1503 - protein, 62 aa, synthetic construct
ESSDDDYDDVDIPTPAEDTPPPLPPKPKFRSPSDEGPGSMGDDGQLSPGVLVRCASGPPPNS

SEQ ID NO: 1504 - protein, 62 aa, synthetic construct
PSDEGPGSMGDDGQLSPGVLVRCASGPPPNSPRPGPPPSTSSPHLTAHSEPSLWNPPSRELD

SEQ ID NO: 1505 - protein, 62 aa, synthetic construct
GPGAAGFPGARGLPGPPGSNGNPGPPGPSGSPGKDGPPGPAGNTGAPGSPGVSGPKGDAGQP

SEQ ID NO: 1506 - protein, 62 aa, synthetic construct
AAGIKGHRGFPGNPGAPGSPGPAGQQGAIGSPGPAGPRGPVGPSGPPGKDGTSGHPGPIGPP

SEQ ID NO: 1507 - protein, 62 aa, synthetic construct
SSLQGRILRTLLQEQARSGGQRHSPLSQRHSPAPQCPSPSPPARAAPPCPPCQSPVPQRRSP

SEQ ID NO: 1508 - protein, 62 aa, synthetic construct
SPAPQCPSPSPPARAAPPCPPCQSPVPQRRSPVPPCPSPQQRRSPASPSCPSPVPQRRSPVP

SEQ ID NO: 1509 - protein, 62 aa, synthetic construct
RAAPPCPPCQSPVPQRRSPVPPCPSPQQRRSPASPSCPSPVPQRRSPVPPSCQSPSPQRRSP

SEQ ID NO: 1510 - protein, 62 aa, synthetic construct
CQSPVPQRRSPVPPCPSPQQRRSPASPSCPSPVPQRRSPVPPSCQSPSPQRRSPVPPSCPAP

SEQ ID NO: 1511 - protein, 62 aa, synthetic construct
LDVSTPSDSVDGPESTRPGAGPDYRLMNGGTPIPNGPRVETPDSSSEEAFGAGPTVKSQLPQ

SEQ ID NO: 1512 - protein, 62 aa, synthetic construct
HRMMTGGNLDSQGDPLPGVPLPPSDPTRQETPPPRSPPVANSGSTGFSRRGSGRGGGPTPWG

SEQ ID NO: 1513 - protein, 62 aa, synthetic construct
LSQIPSDTASPLLILPPPVPNPSPTLRPVETPVVGAPGMGSVSTEPDDEEGLKHLEQQAEKM

SEQ ID NO: 1514 - protein, 62 aa, synthetic construct
AVDTMYVGRKLGLLFFPYLHQDWEVQYQQDTPVAPRFDVNAPDLYIPAMAFITYVLVAGLAL

SEQ ID NO: 1515 - protein, 62 aa, synthetic construct
SQANRYTKEQDYRPKATGRKTPTLASPVPTTPFLRPVHQVPLVPHVPMVRPAHQLHPGLVQR

SEQ ID NO: 1516 - protein, 62 aa, synthetic construct
IPGGEPDQPLSSSSCLQPNHRSTKRKVEVVSPATPVPSETAPASVFPQNGAARRAVAAQPGR

SEQ ID NO: 1517 - protein, 62 aa, synthetic construct
IMTYVSQYYNHFCSPGQAGVSPPRKGLAPCSPPSVAPTPVEPEDVAQGEELSSGSLSEQGTG

SEQ ID NO: 1518 - protein, 62 aa, synthetic construct
PFEEEEEDKEEEAPAAPSLATSPALGHPESTPKSLHPWYGITPTSSPKTKKRPAPRAPSASP

SEQ ID NO: 1519 - protein, 62 aa, synthetic construct
EAPAAPSLATSPALGHPESTPKSLHPWYGITPTSSPKTKKRPAPRAPSASPLALHASRLSHS

SEQ ID NO: 1520 - protein, 62 aa, synthetic construct
APSLATSPALGHPESTPKSLHPWYGITPTSSPKTKKRPAPRAPSASPLALHASRLSHSEPPS

SEQ ID NO: 1521 - protein, 62 aa, synthetic construct
HTSSPGLGKPPGPCLQPKASVLQQLDRVDETPGPPHPKGPPRCSFSPRNSRHEGSFARQQSL

SEQ ID NO: 1522 - protein, 62 aa, synthetic construct
VPNYLANPAFPFIYTPTAEDSAQMQNGGPSTPPASPPADGSPPLLPPGEPPLLGTFPRDHTS

SEQ ID NO: 1523 - protein, 62 aa, synthetic construct
PFIYTPTAEDSAQMQNGGPSTPPASPPADGSPPLLPPGEPPLLGTFPRDHTSLALVQNGDVS

SEQ ID NO: 1524 - protein, 62 aa, synthetic construct
AALPAATTPGPGLETAGPADAPAGAVVGGGSPRGRPGPVPAPGLLAPLLWERTLPFGDVEYV

SEQ ID NO: 1525 - protein, 62 aa, synthetic construct
ALFLRQQSLGGSESPGPAPCSPGLSASPASSPGRRPTPAEEPGELEDNYLEYLREARRGVDR

SEQ ID NO: 1526 - protein, 62 aa, synthetic construct
SPLEPPLPLEEEEAYESFTCPPEPPGPFLSSPLRTLNQLPSQPFTGPFMAVLFAKLENMLQN

SEQ ID NO: 1527 - protein, 62 aa, synthetic construct
ALADFIHQQRTQQVEQDMFAHPYQYELNHFTPADAVLQKPQPQLYRPIEETPCHFISSLDEL

SEQ ID NO: 1528 - protein, 62 aa, synthetic construct
CSDSWQVDDCPESCCEPPCCAPAPCLSLVCTPVSYVSSPCCRVTCEPSPCQSGCTSSCTPSC

SEQ ID NO: 1529 - protein, 62 aa, synthetic construct
EEPTSPAAAVPTPEEPASPAAAVPTPEEPASPAAAVPTPEEPAFPAPAVPTPEESASAAVAV

SEQ ID NO: 1530 - protein, 62 aa, synthetic construct
AAVPTPEEPASPAAAVPTPEEPAFPAPAVPTPEESASAAVAVPTPEESASPAAAVPTPAESA

SEQ ID NO: 1531 - protein, 62 aa, synthetic construct
AVVATLEEPTSPAASVPTPAAMVATLEEFTSPAASVPTSEEPASLAAAVSNPEEPTSPAAAV

SEQ ID NO: 1532 - protein, 62 aa, synthetic construct
FSPPTAGPPCSVLQGTGASQSCHSALPIPATPPTQAQPAMTPASASPSWGSHSTPPLAPATP

SEQ ID NO: 1533 - protein, 62 aa, synthetic construct
SVLQGTGASQSCHSALPIPATPPTQAQPAMTPASASPSWGSHSTPPLAPATPTPSQQCPQDS

SEQ ID NO: 1534 - protein, 62 aa, synthetic construct
TGASQSCHSALPIPATPPTQAQPAMTPASASPSWGSHSTPPLAPATPTPSQQCPQDSPGLRV

SEQ ID NO: 1535 - protein, 62 aa, synthetic construct
PTQAQPAMTPASASPSWGSHSTPPLAPATPTPSQQCPQDSPGLRVGPLIPEQDYERLEDCDP

SEQ ID NO: 1536 - protein, 62 aa, synthetic construct
RDSSKGEDSAEETEAKPAVVAPAPVVEAVSTPSAAFPSDATAEQGPILTKHGKNPVMELNEK

SEQ ID NO: 1537 - protein, 62 aa, synthetic construct
RSFSTGSDLGHWVTTPPDIPGSRNLHWGEKSPPYGVPTTSTPYEGPTEEPFSSGGGGSVQGQ

SEQ ID NO: 1538 - protein, 62 aa, synthetic construct
PEDKEAKEPLWIRPDAPSRCTWQLGRPASESPHHHTAPAKSPKILPDILKKIGDTPMVRINK

SEQ ID NO: 1539 - protein, 62 aa, synthetic construct
SSFCSEALVTCAALTHPRVPPLQPMGPTCPTPAPVPPPEAPSPFRAPPFHPPGPMPSVGSMP

SEQ ID NO: 1540 - protein, 62 aa, synthetic construct
QKFTGLPQQWHSLLADTANRPKPMVDPSCITPIQLAPMKTIVRGNKPCKETSINGLLEDFDN

SEQ ID NO: 1541 - protein, 62 aa, synthetic construct
DPPMKAVPTVAGARFPLFHFKPSPPHPPAPSPAGGHHLGYDPTAAAALSLPLGAAAAAGSQA

SEQ ID NO: 1542 - protein, 62 aa, synthetic construct
GSQAAALESHPYGLPLAKRAAPLAFPPLGLTPSPTASSLLGESPSLPSPPSRSSSSGEGTCA

SEQ ID NO: 1543 - protein, 62 aa, synthetic construct
HDGTSNGTARLPQLGTVGQSPYTSAPPLSHTPNADFQPPYFPPPYQPIYPQSQDPYSHVNDP

SEQ ID NO: 1544 - protein, 62 aa, synthetic construct
IKREKILADIEADEENLKETRWPYLSPRRKSPVRCAGVNPVPCNCNPPVPTVSSRGREQAVR

SEQ ID NO: 1545 - protein, 62 aa, synthetic construct
HRLCCVSCIKKASGPNPGPDPGPTSLPPFSTPGSPLPGPQDPADAAEPPGKPTGSEDHQHGR

SEQ ID NO: 1546 - protein, 62 aa, synthetic construct
VQVNPGEAFTIRREDGQFQCITGPAQVPMMSPNGSVPPIYVPPGYAPQVIEDNGVRRVVVVP

SEQ ID NO: 1547 - protein, 62 aa, synthetic construct
GAELRLFRQAPSAPWGPPAGPLHVQLFPCLSPLLLDARTLDPQGAPPAGWEVFDVWQGLRHQ

SEQ ID NO: 1548 - protein, 62 aa, synthetic construct
SASEESMDFLDKSTASPASTKTGQAGSLSGSPKPFSPQLSAPITTKTDKTSTTGSILNLNLD

SEQ ID NO: 1549 - protein, 62 aa, synthetic construct
QGDYGDLQASSYYGAYPGYAPGLYQYPCFHSPRRPYASPLLNGLALPPAHSPTSHWDQPVYT

SEQ ID NO: 1550 - protein, 62 aa, synthetic construct
QTQPPVAPQAPSSILLPAAPIPILSPCSPPSPQASSLSGPSPASSRLSSSSLSSLGEDQDSV

SEQ ID NO: 1551 - protein, 62 aa, synthetic construct
SPPVPPRPPSSGPPPAPPLSPALSGLPRPASPYGSLRRHPPPWAAPAHVPPAPQASWWAFVE

SEQ ID NO: 1552 - protein, 62 aa, synthetic construct
RRHPPPWAAPAHVPPAPQASWWAFVEPPAVSPEVPPDLLAFPGPRPSFRGSRRRGAAFGFPG

SEQ ID NO: 1553 - protein, 62 aa, synthetic construct
PPFLPPARRPRSLQESPAPRRAAGRLGPPGSPLPGSPRPPSPPLGLCHSPRRSSLNLPSRLP

SEQ ID NO: 1554 - protein, 62 aa, synthetic construct
SLPAEKPPAPEAQPTSVGTGPPAKPVLLRATPKPLAPAPLAKAPRLPIKPVAAPVLAQDQAS

SEQ ID NO: 1555 - protein, 62 aa, synthetic construct
PKPPATLGADGPPPGPPTPPPEDIPAPTEPTPASEATGAPTPPPAPPSPSAPPPVVPKEEKE

SEQ ID NO: 1556 - protein, 62 aa, synthetic construct
GPPPGPPTPPPEDIPAPTEPTPASEATGAPTPPPAPPSPSAPPPVVPKEEKEEETAAAPPVE

SEQ ID NO: 1557 - protein, 62 aa, synthetic construct
AAAASAFLASSVSAKISSLMLPNAASISSASPFSSRSPSLSPNSPLPSEHRSLFLEAACHDS

SEQ ID NO: 1558 - protein, 62 aa, synthetic construct
VGPSSGQLPSFSVPCMVLPSPPLGPFPVLYSPAMPGPVSSTLGALPNTGPVNFSLPGLGSIA

SEQ ID NO: 1559 - protein, 62 aa, synthetic construct
SHSVVQQPESPVYVGHPVSVVKLHQSPVPVTPKSIQRTHRETFFKTPGSLGDPVLKRRERNQ

SEQ ID NO: 1560 - protein, 62 aa, synthetic construct
GLMGKFVLKASLSAPGSEYGSPSVISVSKGSPDGSHPVVVAPYNGGPPRTCPKIKQEAVSSC

SEQ ID NO: 1561 - protein, 62 aa, synthetic construct
WEPLKVLLEALYFSLVAKRLHPDEDDTLVESPAVTPVSARVPRVRPPHGFALFLAKEEARKV

SEQ ID NO: 1562 - protein, 62 aa, synthetic construct
VPWPSPCPSPSSRPPSRYQSGPNSLPPRAATPTRPPSRPPSRPSRPPSHPSAHGSPAPVSTM

SEQ ID NO: 1563 - protein, 62 aa, synthetic construct
NPNAKEFNPRSFSQPKPSTTPTSPRPQAQPSPSMVGHQQPTPVYTQPVCFAPNMMYPVPVSP

SEQ ID NO: 1564 - protein, 62 aa, synthetic construct
SFSQPKPSTTPTSPRPQAQPSPSMVGHQQPTPVYTQPVCFAPNMMYPVPVSPGVQPLYPIPM

SEQ ID NO: 1565 - protein, 62 aa, synthetic construct
SPSMVGHQQPTPVYTQPVCFAPNMMYPVPVSPGVQPLYPIPMTPMPVNQAKTYRAVPNMPQQ

SEQ ID NO: 1566 - protein, 62 aa, synthetic construct
IQSDDDWIPDIQIDPNGLSFNPISDFPDTTSPKCPGRPWKSVSEINPTTQMKESYYFDLTDG

SEQ ID NO: 1567 - protein, 62 aa, synthetic construct
SHGLQSCRNLRGSPKLPDFLQRNPLPPILGSPTKAVPSFDFPKTPSSQNLLALLARQGVVMT

SEQ ID NO: 1568 - protein, 62 aa, synthetic construct
EEEEEEEGSGHSTGEDSAFQEPDSPLPPARSPTEPGPERRRSPGPAPGSPGELEEDLLLPGA

SEQ ID NO: 1569 - protein, 62 aa, synthetic construct
FQEPDSPLPPARSPTEPGPERRRSPGPAPGSPGELEEDLLLPGACPGADEAGGGAEGDSWEE

SEQ ID NO: 1570 - protein, 62 aa, synthetic construct
PAGEQGPRGDRGDKGEKGAPGPRGRDGEPGTPGNPGPPGPPGPPGPPGLGGNFAAQMAGGFD

SEQ ID NO: 1571 - protein, 62 aa, synthetic construct
LVGPRGERGFPGERGSPGAQGLQGPRGLPGTPGTDGPKGASGPAGPPGAQGPPGLQGMPGER

SEQ ID NO: 1572 - protein, 62 aa, synthetic construct
APGASGDRGPPGPVGPPGLTGPAGEPGREGSPGADGPPGRDGAAGVKGDRGETGAVGAPGAP

SEQ ID NO: 1573 - protein, 62 aa, synthetic construct
LQLPKDAPHLLQPHSAPTWGTIPKLPPPGRSPLAQRPLRRQAAIRTDSLDVQGLGSREDLLA

SEQ ID NO: 1574 - protein, 62 aa, synthetic construct
RMESRRQATVSWDSGGSDEAPPKPSRPGYPSPRSSEGFYPSPQHMVQTNHYQVSGYPGSHGI

SEQ ID NO: 1575 - protein, 62 aa, synthetic construct
SWDSGGSDEAPPKPSRPGYPSPRSSEGFYPSPQHMVQTNHYQVSGYPGSHGITAMAGSIYPG

SEQ ID NO: 1576 - protein, 62 aa, synthetic construct
QSSPQGPVPHYSQRPLPVYPHQQNYQPSQYSPKQQQIPQSAYHSPPPSQCPSPFSSPQHQVQ

SEQ ID NO: 1577 - protein, 62 aa, synthetic construct
ETASVVAITVQELFPAPILRAVPSAEPQAGSPMTLSCQTKLPLQRSAARLLFSFYKDGRIVQ

SEQ ID NO: 1578 - protein, 62 aa, synthetic construct
LNGLVLLPVLLSFFGPYPEVSPANGLNRLPTPSPEPPPSVVRFAMPPGHTHSGSDSSDSEYS

SEQ ID NO: 1579 - protein, 62 aa, synthetic construct
CEVYQHILQPNMLANKVKFTFPPAALPPPSTPLQPLPLQQSLCSTSVTTIHHTVLQQHAAAA

SEQ ID NO: 1580 - protein, 62 aa, synthetic construct
VQESSDSPSTSPGSASSPPGPPGTTPPGQKSPSGPFCTPQSPVSLAQEGTAQIWKRQSQEVE

SEQ ID NO: 1581 - protein, 62 aa, synthetic construct
FPGDRGLPGPVGALGLKGNEGPPGPPGPAGSPGERGPAGAAGPIGIPGRPGPQGPPGPAGEK

SEQ ID NO: 1582 - protein, 62 aa, synthetic construct
ERGEKGESGPSGAAGPPGPKGPPGDDGPKGSPGPVGFPGDPGPPGEPGPAGQDGPPGDKGDD

SEQ ID NO: 1583 - protein, 62 aa, synthetic construct
PIGPQGAPGKPGPDGLRGIPGPVGEQGLPGSPGPDGPPGPMGPPGLPGLKGDSGPKGEKGHP

SEQ ID NO: 1584 - protein, 62 aa, synthetic construct
APNGPSAGGLAIPQSSSSSSRPPTRARGAPSPGVLGPHASEPQLAPPACTPAAPAVPGPPGP

SEQ ID NO: 1585 - protein, 62 aa, synthetic construct
GVGSAPPASSSAPPATPPTSGAPPGSGPGPTPTPPPAVTSAPPGAPPPTPPSSGVPTTPPQA

SEQ ID NO: 1586 - protein, 62 aa, synthetic construct
DSPMPPSMEDRAPLPPVPAEKFACLSPGYYSPDYGLPSPKVDALHCPPAAVVTVTPSPEGVF

SEQ ID NO: 1587 - protein, 62 aa, synthetic construct
TPRTPKRQGTQPPGFLPNCTWPHSVNSSPESPSCPAPPTSSTAQPRRECLTPIRDPLRTPPR

SEQ ID NO: 1588 - protein, 62 aa, synthetic construct
PALSMPRASRSLSKPEPTYVSPPCPRLSHSTPGKSRGQTYICQACTPTHGPSSTPSPFQTDG

SEQ ID NO: 1589 - protein, 62 aa, synthetic construct
APRGQRPESALPVAGSGRRSDPGHYSFSMRSPELALPRGMQPTEFFQSLGGDGERNVQIEMA

SEQ ID NO: 1590 - protein, 62 aa, synthetic construct
LAKKALLALNHGLDKAHSLMELSPSAPPGGSPHLDSSRSHSPSSPDPDTPSPVGDSRALQAS

SEQ ID NO: 1591 - protein, 62 aa, synthetic construct
HGLDKAHSLMELSPSAPPGGSPHLDSSRSHSPSSPDPDTPSPVGDSRALQASRNTRIPHLAG

SEQ ID NO: 1592 - protein, 62 aa, synthetic construct
MLEPGEYAVVCCAFNHWGPPLPGTPAPQASSPSAGVPRASPEPPGHVLAVYSSRLVMVEPVE

SEQ ID NO: 1593 - protein, 62 aa, synthetic construct
PTAPGAPSPAAGPTKLPPCCHPPDPKPPASSPTPPPRPSAPCTLNVCPASSPGPGSRVRSAE

SEQ ID NO: 1594 - protein, 62 aa, synthetic construct
QVIIRGLPVWFSHFQGILEGSLQCVTQTLETPNLDEPLPVEPKEEEPNLPLVSEEEKSITKP

SEQ ID NO: 1595 - protein, 62 aa, synthetic construct
GNLTKISYVADKQQSRPKSESMAKKQPACKTPGKPAGQQSDYAVSEPVWITMAKQKQKSFKA

SEQ ID NO: 1596 - protein, 62 aa, synthetic construct
ASTESLLEERAGRGASEGPPAPALPCPGAPTPSPLPTVAAPPRRRPSSFVTVRVKTPRRTPI

SEQ ID NO: 1597 - protein, 62 aa, synthetic construct
WAPGAREAAAPVRRREPPARRPDQIHSVYITPGADLPVQGALEPLEEDGQPPGAKRRYSDPP

SEQ ID NO: 1598 - protein, 62 aa, synthetic construct
FRGAVYHSYLTIFGQIPGYIDGVNFNPEHCSPNGTDPYKPKCPESDATQQRPAFPEWLTVLL

SEQ ID NO: 1599 - protein, 62 aa, synthetic construct
AFLSAGLGILAPSETYPLPTTSSGWEPRLGSPFPSGPCTSSTGAQAVAEPTGQGPKNPRVSR

SEQ ID NO: 1600 - protein, 62 aa, synthetic construct
ALLEPYFPQEPYGDYRPPALTPNAGSLFSASPLPPLLPPPFPGDPAHFLFRDSWEQTLPDGL

SEQ ID NO: 1601 - protein, 62 aa, synthetic construct
LPPAAPGKEDKAPVAPTEAPDMAKVAPKPATPDKVPAAEQIPEAEPPKDEESFRPREDEEGQ

SEQ ID NO: 1602 - protein, 62 aa, synthetic construct
VPPGPPLSGGLSPDPKPGGAPTSSRRPLLSSPSWGGPEPEGRAGGGIPGSSSPHPGTGSRRL

SEQ ID NO: 1603 - protein, 62 aa, synthetic construct
KGKSKTLDNSDLHPGPPAGSPPPLTLPPTPSPATAVTAASAQPPGPAPPITLEPPAPGLKRG

SEQ ID NO: 1604 - protein, 62 aa, synthetic construct
VAHNQVAADNAVSTAAEPRRRPEPSSSSSSSPAAPARPRPCPAVPAPAPGDTHFRTFRSHAD

SEQ ID NO: 1605 - protein, 62 aa, synthetic construct
LADLFSPSPLRDPLPPQPVSPLDSKFPIDHSPPQQLPFPLLPPHHIERVEPSLQPEASLSLN

SEQ ID NO: 1606 - protein, 62 aa, synthetic construct
IIDVDALWSHRGSEDGPRPQSNWKESANKMSPSGGAPQTTPTLRSRPKDLPVRRKTDVISDT

SEQ ID NO: 1607 - protein, 62 aa, synthetic construct
RVQLQAGVPVGNLSLAKRLDSPRYPIPPRMTPKPCQDPPANFPLTAPSHIQENQILSQLLGH

SEQ ID NO: 1608 - protein, 62 aa, synthetic construct
PEHSHLTQATVQPLDLGFTITPESMTEVELSPTMKETPTQPPKKVVPQLRVYQGVTNPTPGQ

SEQ ID NO: 1609 - protein, 62 aa, synthetic construct
TIWSLRHPRPIWSPVTIRITPPDQRVPPSTSPEDVIALAGLPPSEELADPCSKETVLRALRE

SEQ ID NO: 1610 - protein, 62 aa, synthetic construct
SAHYSEVPYGDPRDTGPSVFPPRWDSGLDVTPANKEPVQKSTPSDTCCELESDCDSDEGSLF

SEQ ID NO: 1611 - protein, 62 aa, synthetic construct
LQAPASHEDLDAPHGGPSLAPPSTTTSSRDTPGPAGPAGRQPGRAGPDRTKGLAWSPGPSVQ

SEQ ID NO: 1612 - protein, 62 aa, synthetic construct
TSSRDTPGPAGPAGRQPGRAGPDRTKGLAWSPGPSVQVSVAPAGLGGALSTVTIQAQQCLEG

SEQ ID NO: 1613 - protein, 62 aa, synthetic construct
TFAELQERLECMDGNEGPSGGPGGTDGAQASPARGGRKPSPPEAASPRKAVGTPMAASTPRG

SEQ ID NO: 1614 - protein, 62 aa, synthetic construct
LAPKAGFLPRPSGAAPPAPPTRKSSLEQRSSPASAPPHAVNPARVGAAAVLRGEEEPRPSSR

SEQ ID NO: 1615 - protein, 62 aa, synthetic construct
DQKCKQARKAGEARKQAEKEVPWSPSAEKASPQENGPAVHKGSPEFPAQETPTTFPEEAPTV

SEQ ID NO: 1616 - protein, 62 aa, synthetic construct
KGQPAFPNIGQNGVLFPNLKTVQPVLPFYRSPATPAEVANTPGILPSLPLLSSSIPEQLISN

SEQ ID NO: 1617 - protein, 62 aa, synthetic construct; identical to SEQ ID NO: 1605

SEQ ID NO: 1618 - protein, 62 aa, synthetic construct
ADTSRQASFHCKESYLPVPGRFLTSAPRGLTPVAERPAVGELEDSPQKKMQSRAWGKVEVRP

SEQ ID NO: 1619 - protein, 62 aa, synthetic construct
RLSVRRGEFSSSDPNIRAPQLPGTSEPSAYSPGGLVPRRHAPSGNQQPPVHPPRPERQQQPP

SEQ ID NO: 1620 - protein, 62 aa, synthetic construct; identical to SEQ ID NO: 1618

SEQ ID NO: 1621 - protein, 62 aa, synthetic construct; identical to SEQ ID NO: 1619

SEQ ID NO: 1622 - protein, 62 aa, synthetic construct
ALKAKVIQKLEDVSKPPAYAYPATPSSHPTSPPPASPPPTPGITRKEEAPENVVEKKDLELE

SEQ ID NO: 1623 - protein, 62 aa, synthetic construct
AATLEEGNPTDEVPSTPLALEPSSTPGSKKSPPEPVDKRAKAPKARPAPPQPSPAPPAFTSC

SEQ ID NO: 1624 - protein, 62 aa, synthetic construct
RPQLVALAPAPGFSWFPPRPPPGSPWAPAWTPRPTGPDLDTALPGTAEDALEPEAGPEDPAE

SEQ ID NO: 1625 - protein, 62 aa, synthetic construct
GLLSSEGPSGKWSLGGRKGLGGSDGEPASGSPKGGTPKSQAPLDLSLSLSLSLSPDVSTEAS

SEQ ID NO: 1626 - protein, 62 aa, synthetic construct
EGPSGKWSLGGRKGLGGSDGEPASGSPKGGTPKSQAPLDLSLSLSLSLSPDVSTEASPPRAS

SEQ ID NO: 1627 - protein, 62 aa, synthetic construct
PRPGQHALTMPALEPAPPLLADLGPALEPESPAALGPPGYLHSAPGPAPAPGEGPPPGTVLE

SEQ ID NO: 1628 - protein, 62 aa, synthetic construct
PVEKEAEPMDAEPAGDTRAPRPPPAAPAPPTPAYGAPSTNVTLEALLSTKVAVAQFSQGARA

SEQ ID NO: 1629 - protein, 62 aa, synthetic construct
VPTSVGLQLPPTVPGAHGYADSPSATPASRSPQRPSPASSECASLSPGLNHVESGVSATAES

SEQ ID NO: 1630 - protein, 62 aa, synthetic construct
GLQLPPTVPGAHGYADSPSATPASRSPQRPSPASSECASLSPGLNHVESGVSATAESPQSLL

SEQ ID NO: 1631 - protein, 62 aa, synthetic construct
LQLINNQDSDFPGLFDPPYAGSGAGGTDPASPDTSSPGSLSPPPATLSSSLEAFLSGPQAAP

SEQ ID NO: 1632 - protein, 62 aa, synthetic construct
SPGSLSPPPATLSSSLEAFLSGPQAAPSPLSPPQPAPTPLKMYPSMPAFSPGPGIKEESVPL

SEQ ID NO: 1633 - protein, 62 aa, synthetic construct
DINVPRALVDILRHQAGPGTRPDRARSSSLTPGIGGPDSMPPRTPKNLYNTVKTPNLDWRAL

SEQ ID NO: 1634 - protein, 62 aa, synthetic construct
LPVSSATRHLWLSSSPPDNKPGGDLPALSPSPIRQHPADKLPSREADLGEACQSRETVLFSH

SEQ ID NO: 1635 - protein, 62 aa, synthetic construct
PETGQYVDVPMTSQQQAVAPMSISVPPLALSPGAYGPTYMIYPGFLPTVLPTNALQPTPIAR

SEQ ID NO: 1636 - protein, 62 aa, synthetic construct; identical to SEQ ID NO: 97

SEQ ID NO: 1637 - protein, 62 aa, synthetic construct
LKPQPLQQPSQPQQPPPTQQAVARRPPGGTSPPNGGLPGPLATSAAPPGPPAAASPCLGPVA

SEQ ID NO: 1638 - protein, 62 aa, synthetic construct
SKEPTPGGLNHSLPQHPKCWGAHHASLDQSSPPQSGPPGTPPSYKLPLPGPYDSRDDFPLRK

SEQ ID NO: 1639 - protein, 62 aa, synthetic construct
WKETPCILSVNVKNKQDDDLNCEPLSPHNITPEPVSKLPAEPVSGDPAPGDLDAGDPASGVL

SEQ ID NO: 1640 - protein, 62 aa, synthetic construct
APASEQLSPPASPPGAPPVLNPPSTRSSFPSPRLSLPTDSLSPDGGSIELEFYLAPEPFSMP

SEQ ID NO: 1641 - protein, 62 aa, synthetic construct
REAPWDSAPMASPGLPAASTQPWRKLPEQKSPTAGKPCALQRQQATAAEKPWDAKAPEGRLR

SEQ ID NO: 1642 - protein, 62 aa, synthetic construct; identical to SEQ ID NO: 1538

SEQ ID NO: 1643 - protein, 62 aa, synthetic construct
PPEGRTLQGQLPGAPPAQRAGSPPDAPGSESPALACSTPATPSGEDPPARAAPIAPRPPARP

SEQ ID NO: 1644 - protein, 62 aa, synthetic construct
LPGAPPAQRAGSPPDAPGSESPALACSTPATPSGEDPPARAAPIAPRPPARPRLERALSLDD

SEQ ID NO: 1645 - protein, 62 aa, synthetic construct
HLGKVWIPDDLRKRLNIEMHAVVRITPVEVTPKIPRSLKLQPRENLPKDISEEDIKTVFYSW

SEQ ID NO: 1646 - protein, 62 aa, synthetic construct
EEQKKQETPKLWPVQLQKEQDPKKQTPKSWTPSMQSEQNTTKSWTTPMCEEQDSKQPETPKS

SEQ ID NO: 1647 - protein, 62 aa, synthetic construct
RCLSETHGEREPCKKRLTARSISTPTCLGGSPAAERPADLPPAAALPQPEVILLDSDLDEPI

SEQ ID NO: 1648 - protein, 62 aa, synthetic construct
GDGNNPNCCMNQKKDHSVSLSPSLFKPEEFTPLDPTQEPIFPPELLRLKDTPRKQLRFEGER

SEQ ID NO: 1649 - protein, 62 aa, synthetic construct
ATELRSHSTQSEAGSLPAFTVPQAAAPGSTTPSATSSSSSCSTPNSPEDYYTSLDNDLKIEV

SEQ ID NO: 1650 - protein, 62 aa, synthetic construct
VPNDKFTQNPMRGLGHPLRHLPLPQPPSAISPGENSKSRFPPQCYATQYQDYSLSSAHKVSG

SEQ ID NO: 1651 - protein, 62 aa, synthetic construct
GLVPPPEEFANGVLLATPLAGPGPSPTTVPSPASGKPSSEPPPAPESAADSGVEEADTRSSS

SEQ ID NO: 1652 - protein, 62 aa, synthetic construct
GELTDTHTSFADGHTFLLEKPPVPPKPKLKSPLGKGPVTFRDPLLKQSSDSELMAQQHHAAS

SEQ ID NO: 1653 - protein, 62 aa, synthetic construct
PSAQPVLAVAGGVTQLPNHVVNVVPAPSANSPVNGKLSVTKPVLQSTMRNVGSDIAVLRRQQ

SEQ ID NO: 1654 - protein, 62 aa, synthetic construct
KASNPEPSFKANENGLPPSSIFLSPNEAFRSPPIPYPRSYLPYPAPEGIAVSPLSLHGKGPV

SEQ ID NO: 1655 - protein, 62 aa, synthetic construct
SDERGAHIMNSTCAAMPKLHEPYASSQCIASPNFGTVSGLKPASMLEKNCSLQTELNKSYDV

SEQ ID NO: 1656 - protein, 62 aa, synthetic construct
GPPLHKDDVNGIRHLYGPRPEPEPRPPTTTTPQPTAPPTVCPTGPPTVHPSERPTAGPTGPP

SEQ ID NO: 1657 - protein, 62 aa, synthetic construct
LNPMAIDSPAMDFSRRLRELAGNSSTPPPVSPGRGNPMHRLLNPFQPSPKSPFLSTPPLPPM

SEQ ID NO: 1658 - protein, 62 aa, synthetic construct
AGNSSTPPPVSPGRGNPMHRLLNPFQPSPKSPFLSTPPLPPMPPGGTPPPQPPAKSKSCEFC

SEQ ID NO: 1659 - protein, 62 aa, synthetic construct
TPPPVSPGRGNPMHRLLNPFQPSPKSPFLSTPPLPPMPPGGTPPPQPPAKSKSCEFCGKTFK

SEQ ID NO: 1660 - protein, 62 aa, synthetic construct
PMHRLLNPFQPSPKSPFLSTPPLPPMPPGGTPPPQPPAKSKSCEFCGKTFKFQSNLIVHRRS

SEQ ID NO: 1661 - protein, 62 aa, synthetic construct
DSIIVFYNSVFMQRLKTNILQYASTRPPTLSPIPHIPRSPYKFPSSPLRIPGGNIYISPLKS

SEQ ID NO: 1662 - protein, 62 aa, synthetic construct
GAEVAVTCMVFQTQPVSSQPQPEGANEAVPTPVVDPDAPPSPPLGAPGLPPAGSPPDSHVLL

SEQ ID NO: 1663 - protein, 62 aa, synthetic construct
GANEAVPTPVVDPDAPPSPPLGAPGLPPAGSPPDSHVLLAAPPGHQLHRAHYDLRHTFMGVV

SEQ ID NO: 1664 - protein, 62 aa, synthetic construct
TDGGTLQSPSEATATRPAVPGLPTVVPTLVTPSAPGNRTVDLFPVLPICVCDLTPGACDINC

SEQ ID NO: 1665 - protein, 62 aa, synthetic construct
QDEVPGSQGSQASQAPPVPGPPPGAPHTPQTPGQGGPASTPAQTAAGGQGGPGGPGSDKQQQ

SEQ ID NO: 1666 - protein, 62 aa, synthetic construct
PSVRQTPSRQPPLPHRSRGGGGGSRGGARASPATQPPPLLPPSATGPDATVGGPAPTPLLPP

SEQ ID NO: 1667 - protein, 62 aa, synthetic construct
SSDVAVELPFTLMHPKPKEEPPHREVPENETPVDTNLIELDTNDDDIVFEDFARQRLKGMKD

SEQ ID NO: 1668 - protein, 62 aa, synthetic construct
HDGVPSHSSRLSQLGSVSQGPYSSAPPLSHTPSSDFQPPYFPPPYQPLPYHQSQDPYSHVND

SEQ ID NO: 1669 - protein, 62 aa, synthetic construct
IQWPTTETGKENNPVCPPEPTPWIRTHLSQSPRVPSKCVQHYCHTSPTPGAPVYTHVDRLTV

SEQ ID NO: 1670 - protein, 62 aa, synthetic construct
RSLPPSPRQRHAVRTPPRTPNIVTTVTPPGTPPMRKKNKLKPPGTPPPSSRKLIHLIPGFTA

SEQ ID NO: 1671 - protein, 62 aa, synthetic construct
RQQKNFNLPASHYYKYKQQFIFPDVVPVPETPTRAPQVILHPVTSNPILEGNPLLQIEVEPT

SEQ ID NO: 1672 - protein, 62 aa, synthetic construct
SGYIPSGHSLGTPEPAPRASLESVPPGRSYSPYDYQPCLAGPNQDFHSKSPASSSLPAFLPT

SEQ ID NO: 1673 - protein, 62 aa, synthetic construct
LPAFLPTTHSPPGPQQPPASLPGLTAQPLLSPKEATSDPSRTPEEEPLNLEGLVAHRVAGVQ

SEQ ID NO: 1674 - protein, 62 aa, synthetic construct
SASGYQAPSTPSFPVSPAYYPGLSSPATSPSPDSAAFRQGSPTPALPEKRRMSVGDRAGSLP

SEQ ID NO: 1675 - protein, 62 aa, synthetic construct
SNSRSPSLERSSKPLAPNSNPPTKDSLLPRSPVKPMDSITSPSIAELHNSVTNCDPPLRLTK

SEQ ID NO: 1676 - protein, 62 aa, synthetic construct
QGQVPGAALPNPLNMLGPQASQLPCPPVTQSPLHPTPPPASTAAGMPSLQHTTPPGMTPPQP

SEQ ID NO: 1677 - protein, 62 aa, synthetic construct
GAALPNPLNMLGPQASQLPCPPVTQSPLHPTPPPASTAAGMPSLQHTTPPGMTPPQPAAPTQ

SEQ ID NO: 1678 - protein, 62 aa, synthetic construct
AQLMRRRMATMNTRNVPQQSLPSPTSAPPGTPTQQPSTPQTPQPPAQPQPSPVSMSPAGFPS

SEQ ID NO: 1679 - protein, 62 aa, synthetic construct
MATMNTRNVPQQSLPSPTSAPPGTPTQQPSTPQTPQPPAQPQPSPVSMSPAGFPSVARTQPP

SEQ ID NO: 1680 - protein, 62 aa, synthetic construct
MNTRNVPQQSLPSPTSAPPGTPTQQPSTPQTPQPPAQPQPSPVSMSPAGFPSVARTQPPTTV

SEQ ID NO: 1681 - protein, 62 aa, synthetic construct
GQQIATSLSNQVRSPAPVQSPRPQSQPPHSSPSPRIQPQPSPHHVSPQTGSPHPGLAVTMAS

SEQ ID NO: 1682 - protein, 62 aa, synthetic construct
QVRSPAPVQSPRPQSQPPHSSPSPRIQPQPSPHHVSPQTGSPHPGLAVTMASSIDQGHLGNP

SEQ ID NO: 1683 - protein, 62 aa, synthetic construct
APVQSPRPQSQPPHSSPSPRIQPQPSPHHVSPQTGSPHPGLAVTMASSIDQGHLGNPEQSAM

SEQ ID NO: 1684 - protein, 62 aa, synthetic construct
IPSELGACDFEKPESPRAASSSSPGSPVASSPSRLSPTPDGPPPLAQPPLILQPLASPLQVG

SEQ ID NO: 1685 - protein, 62 aa, synthetic construct
GACDFEKPESPRAASSSSPGSPVASSPSRLSPTPDGPPPLAQPPLILQPLASPLQVGVPPMT

SEQ ID NO: 1686 - protein, 62 aa, synthetic construct
CDFEKPESPRAASSSSPGSPVASSPSRLSPTPDGPPPLAQPPLILQPLASPLQVGVPPMTLP

SEQ ID NO: 1687 - protein, 62 aa, synthetic construct
QATPTLIPTETAALYPSSALLPAARVPAAPTPVAYYPGPATQLYLNYTAYYPSPPVSPTTVG

SEQ ID NO: 1688 - protein, 62 aa, synthetic construct
PYWTSPEKMEKKLHAVPAAKTVKFKCPSSGTPNPTLRWLKNGKEFKPDHRIGGYKVRYATWS

SEQ ID NO: 1689 - protein, 62 aa, synthetic construct
IVAMPTTSKADVEQNTEDNGKPEKPEPSSPSPRAPASSQHPSVPASPQGRNAKDLLLDLKNK

SEQ ID NO: 1690 - protein, 62 aa, synthetic construct
PWQWVTLLLGLLLPPAAPFWLLNVLFPPHTTPKAELSNHTRPVILVPGCLGNQLEAKLDKPD

SEQ ID NO: 1691 - protein, 62 aa, synthetic construct
IKGSVGDPGLPGLPGTPGAKGQPGLPGFPGTPGPPGPKGISGPPGNPGLPGEPGPVGGGGHP

SEQ ID NO: 1692 - protein, 62 aa, synthetic construct
PGQSLEPHPEGPQRLRSDPGPPTETPSQRPSPLKRAPGPKPQVPPKPSYLQMPRMPPPLEPI

SEQ ID NO: 1693 - protein, 62 aa, synthetic construct
IGWLNGYNETTGERGDFPGTYVEYIGRKKISPPTPKPRPPRPLPVAPGSSKTEADVEQQALT

SEQ ID NO: 1694 - protein, 62 aa, synthetic construct
MQIQRAAETQRQMAHVQIFQRPIQHQMPPMTPMAPMGMNPPPMTRGPSGHLEPGMGPTGMQQ

SEQ ID NO: 1695 - protein, 62 aa, synthetic construct
GQQIPNSLSNQVRSPQPVPSPRPQSQPPHSSPSPRMQPQPSPHHVSPQTSSPHPGLVAAQAN

SEQ ID NO: 1696 - protein, 62 aa, synthetic construct
QVRSPQPVPSPRPQSQPPHSSPSPRMQPQPSPHHVSPQTSSPHPGLVAAQANPMEQGHFASP

SEQ ID NO: 1697 - protein, 62 aa, synthetic construct
QPVPSPRPQSQPPHSSPSPRMQPQPSPHHVSPQTSSPHPGLVAAQANPMEQGHFASPDQNSM

SEQ ID NO: 1698 - protein, 62 aa, synthetic construct
VGGLDFSPVQTSQGASDPLPDPLGLMDLSTTPLQSAPPLESPQRLLSSEPLDLISVPFGNSS

SEQ ID NO: 1699 - protein, 62 aa, synthetic construct
TSQGASDPLPDPLGLMDLSTTPLQSAPPLESPQRLLSSEPLDLISVPFGNSSPSDIDVPKPG

SEQ ID NO: 1700 - protein, 62 aa, synthetic construct
ICSAPATLTPRSPHASRTPSSPLQSCTPSLSPRSHVPSPHQALVTRPQKPSLEFKEFVGLPC

SEQ ID NO: 1701 - protein, 62 aa, synthetic construct
SETAETFDSMRASGHVASEVSTSLLVPAVTTPVLAESILEPPAMAAPESSAMAVLESSAVTV

SEQ ID NO: 1702 - protein, 62 aa, synthetic construct
INICAHVLDDVAPGPAIKAALPSLTNPPSLSPIRRKGKEKEPGEQASVPLSPKKGSEASAAS

SEQ ID NO: 1703 - protein, 62 aa, synthetic construct
APGAFGGPPRAPPADLPLPVGGPGGWSRRASPAPSDSSPGEPFVGGPVSSPRAPRPVVSDTE

SEQ ID NO: 1704 - protein, 62 aa, synthetic construct
DFGVGEGPAAPSPGSAPVPGTQPPLQSFEGSPDAGQTVEVKPAGEQPLQPVLNAVAAGTPAP

SEQ ID NO: 1705 - protein, 62 aa, synthetic construct
PSETDGYVAPLTCSPQPEYVNQPDVRPQPPSPREGPLPAARPAGATLERPKTLSPGKNGVVK

SEQ ID NO: 1706 - protein, 62 aa, synthetic construct
VKFKDPNCVGTVLASRPHTLDGRNIDPKPCTPRGMQPERTRPKEGWQKGPRSDNSKSNKIFV

SEQ ID NO: 1707 - protein, 62 aa, synthetic construct
VAPLDPPVNAEMELTAPSLIQPLGMVPLIPSPLSSAVPLILPQAPSGPSYAIYLQPTQAHQS

SEQ ID NO: 1708 - protein, 62 aa, synthetic construct
RPAQNRAQKLLHYLGHVMVNGPTTPIPVKASPSPTDPVVPAVPIGPPPAGFRDILLREGPEG

SEQ ID NO: 1709 - protein, 62 aa, synthetic construct
QSIYSTSFPQPAPRQPHLASRPCPSPRPCPSPRPGHPVSMVRVSPRPSPTQQPRPKGFPKVG

SEQ ID NO: 1710 - protein, 62 aa, synthetic construct
PAKTPPAPKTPPSSGEPPKSGDRSGYSSPGSPGTPGSRSRTPSLPTPPTREPKKVAVVRTPP

SEQ ID NO: 1711 - protein, 62 aa, synthetic construct
PPSSGEPPKSGDRSGYSSPGSPGTPGSRSRTPSLPTPPTREPKKVAVVRTPPKSPSSAKSRL

SEQ ID NO: 1712 - protein, 62 aa, synthetic construct
EPPKSGDRSGYSSPGSPGTPGSRSRTPSLPTPPTREPKKVAVVRTPPKSPSSAKSRLQTAPV

SEQ ID NO: 1713 - protein, 62 aa, synthetic construct
LIPPLNQLELLRNLKSKSGLAFRKDPPPEPSPSKGSPCRGPLCGCCPGRSSQKVSLKDRVFS

SEQ ID NO: 1714 - protein, 62 aa, synthetic construct
NQLELLRNLKSKSGLAFRKDPPPEPSPSKGSPCRGPLCGCCPGRSSQKVSLKDRVFSSPRGV

SEQ ID NO: 1715 - protein, 62 aa, synthetic construct
SFAPYLAPVTPGVGLVPTEILPTTPVIVPGSPPVTVPGSTATQKLLRTDKLEVCREFQRGNC

SEQ ID NO: 1716 - protein, 62 aa, synthetic construct
PGTSGQQPSVGQQMIFEEHGFRRTTPPTTATPIRHRPRPYPPNVGEEIQIGHIPREDVDYHL

SEQ ID NO: 1717 - protein, 62 aa, synthetic construct
TAVKQFQGMPPCTYTMPSQFLPQQATYFPPSPPSSEPGSPDRQAEMLQNLTPPPSYAATIAS

SEQ ID NO: 1718 - protein, 62 aa, synthetic construct
VIRALGPLVPPTEGGLWSDQVSWPLWEDVKTPEPGEPGSPLPASPHPPLQPPAFPDPPIRSP

SEQ ID NO: 1719 - protein, 62 aa, synthetic construct
TPEPGEPGSPLPASPHPPLQPPAFPDPPIRSPDPAVSSAHSFPAPRLAWSCVLHSPLSLPLS

SEQ ID NO: 1720 - protein, 62 aa, synthetic construct
PGSLLPTPASLWQAQCPRHMHSWSSAPGRLTPHPPGPAPGTKLATGATSSACSRPQGRPCPQ

SEQ ID NO: 1721 - protein, 62 aa, synthetic construct
SAQAGPPETAHAADPQPRGPQAPPRLPPSLSPERVHPGQPAAPAEPAPGAPALRSGPSQPRG

SEQ ID NO: 1722 - protein, 62 aa, synthetic construct
SLPWPLRAAPLYAGRSGQGGEPGARAPRQGTPEPGELDQERPPAPPEQGRRAAAAVAKSGGG

SEQ ID NO: 1723 - protein, 62 aa, synthetic construct
SAGNKENARTWRRSEGGLAGPPLAKAPRSHSPPGCSPHGQSLPPRRRTPPSQLTGSARSRRP

SEQ ID NO: 1724 - protein, 62 aa, synthetic construct
ENARTWRRSEGGLAGPPLAKAPRSHSPPGCSPHGQSLPPRRRTPPSQLTGSARSRRPGSPFR

SEQ ID NO: 1725 - protein, 62 aa, synthetic construct
RSPGAGGVQGGGAGGIPAPRAPRPPPSGAPSPTHVEPPRPRRPAPTREGTRASPHTRASRSR

SEQ ID NO: 1726 - protein, 62 aa, synthetic construct
CWDSHLPFRKKGAAPAPGCGDRIDTVPTSATPNGRTPGRGALLAAPILSQPCHFQSCQHPSQ

SEQ ID NO: 1727 - protein, 62 aa, synthetic construct
GCLSKGSQRSLTPSWSPSVSPGSEADSSWGTPSTPPRPHSPPSLPRPSPSPWVQARPGIPPP

SEQ ID NO: 1728 - protein, 62 aa, synthetic construct
SPGSEADSSWGTPSTPPRPHSPPSLPRPSPSPWVQARPGIPPPSEQTLFKGLWRLEGIEPPP

SEQ ID NO: 1729 - protein, 62 aa, synthetic construct
PAGSPAAPLQTATSVPPWVSSCTTSNCNISSPLGLQQHGPQPGTSAPPNPGLQLHSPQPGTS

SEQ ID NO: 1730 - protein, 62 aa, synthetic construct
NCNISSPLGLQQHGPQPGTSAPPNPGLQLHSPQPGTSAPPNPGLQLHGPQTGTSAPCRVSSC

SEQ ID NO: 1731 - protein, 12 aa, synthetic construct
GRKKRRQRRRPQ

SEQ ID NO: 1732 - protein, 5 aa, synthetic construct
  REPEAT 1..5: note = Repeat N times, where n represents an integer of at least 1.
GSGGS

SEQ ID NO: 1733 - protein, 4 aa, synthetic construct
  REPEAT 1..4: note = Repeat n times, where n = an integer of at least 1
GGGS

SEQ ID NO: 1734 - protein, 5 aa, synthetic construct
  REGION 1..5: note = Repeat n times, where n = an integer of at least 1
GGGGS

SEQ ID NO: 1735 - protein, 4 aa, synthetic construct
GGSG

SEQ ID NO: 1736 - protein, 5 aa, synthetic construct
GGSGG

SEQ ID NO: 1737 - protein, 5 aa, synthetic construct
GSGSG

SEQ ID NO: 1738 - protein, 5 aa, synthetic construct
GSGGG

SEQ ID NO: 1739 - protein, 5 aa, synthetic construct
GGGSG

SEQ ID NO: 1740 - protein, 5 aa, synthetic construct
GSSSG

SEQ ID NO: 1741 - protein, 5 aa, synthetic construct
GGGGS

SEQ ID NO: 1742 - protein, 15 aa, synthetic construct
GGGGSGGGGSGGGGS

SEQ ID NO: 1743 - protein, 8 aa, synthetic construct
GGSGGGSG

SEQ ID NO: 1744 - protein, 9 aa, synthetic construct
GIHGVPAAT

SEQ ID NO: 1745 - protein, 7 aa, synthetic construct
PKKKRKV

SEQ ID NO: 1746 - protein, 8 aa, synthetic construct
RRARRPRG

SEQ ID NO: 1747 - protein, 16 aa, synthetic construct
KRPAATKKAGQAKKKK

SEQ ID NO: 1748 - protein, 46 aa, synthetic construct
PLDLPGSAEPPKQCHPCPGVPQGTSPAPVPYGYFGGGYYSCRVSRS

SEQ ID NO: 1749 - protein, 47 aa, synthetic construct
PDPGPDEAPRMPEAAPPVAPAPAAPTPAAPAPAPSWPLSSSVPSQKT

SEQ ID NO: 1750 - protein, 46 aa, synthetic construct
HSTQSEAGSLPAFTVPQAAAPGSTTPSATSSSSSCSTPNSPEDYYT

SEQ ID NO: 1751 - protein, 46 aa, synthetic construct
TQNPMRQLGHPLRHLPLPQPPSAISPGENSKSRFPPQCYATQYQDY

SEQ ID NO: 1752 - protein, 54 aa, synthetic construct
LMLSPDDIEQWFTEDPGPDEAPRMPEAAPPVAPAPAAPTPAAPAPAPSWPLSSS
